(19) United States
(12) Patent Application Publication
(10) Pub. No.: US 2025/0276035 A1
(43) Pub. Date: Sep. 4, 2025

(54) ANTIBACTERIAL POLYPEPTIDES

(71) Applicants: Novalysin AB, Lund (SE); Universiteit Gent, Gent (BE)

(72) Inventors: Adel Elsayed Attia Abouhmad, Lund (SE); Rajni Hatti Kaul, Lund (SE); Yves Briers, Nederokkerzeel (BE); Dennis Grimon, Gent (BE); Mats Clarsund, Gent (SE); Tarek Dishisha, Lund (SE)

(21) Appl. No.: 18/549,364

(22) PCT Filed: Mar. 9, 2022
(86) PCT No.: PCT/EP2022/056059

§ 371 Date: Sep. 7, 2023

(30) Foreign Application Priority Data
Mar. 9, 2021 (SE) 2150270-3

(51) Int. Cl. A61K 38/16; A61K 38/46; A61K 45/06; A61P 31/06; C07K 14/35; C12N 9/18

(52) U.S. Cl. CPC A61K 38/164; A61K 38/465; A61K 45/06; A61P 31/06; C07K 14/35; C12N 9/18; C12Y 301/01013; C07K 2319/00

(57) ABSTRACT

The present invention relates to antimicrobial peptides comprised of a first domain with activity specific to a peptidoglycan or component thereof; a second domain with activity specific to an ester linkage; and a third domain with membrane permeabilising activity. The invention also relates to the use of such peptides in medicine, for example for treating mycobacterial infection.

### FIELD

[0001] The present invention is in the field of antimicrobial peptides, in particular those for use against mycobacteria.

### BACKGROUND

[0002] Mycobacterium tuberculosis (Mtb), an acid-fast microorganism, is the causative agent of tuberculosis (TB), which is considered a health threat due to the highly emerged resistance rates (Muller et al., 2013). TB is considered one of the leading causes of death worldwide with 10 million patients in 2017 (WHO 2018) with half million new multidrug resistant TB cases. Despite the existence of curative chemotherapy, the emergence of the alarming context of multidrug-resistant (MDR), extremely drug-resistant (XDR), and totally drug-resistant (TDR) TB and the lack of effective therapies has increased the demand for developing new and innovative antimycobacterials (Marrakchi et al., 2014; Mitnick et al., 2009).

[0003] The major characteristic feature of mycobacteria is their unique cell wall structure with up to 60% lipid content compared to 5-10% for Gram-positive and Gram-negative bacteria (Neyrolles & Guilhot, 2011). The cell wall of Mtb consists of an inner peptidoglycan layer that is covalently linked to arabinogalactan, which is esterified with mycolic acids (MA). MA are long chain (C₆₀-C₉₀), α-branched, β-hydroxy fatty acids containing cyclopropane rings, double bonds, and oxygenated groups, according to the species and genera (Watanabe et al., 2001). The specific composition of the MA is dependent on the Mycobacterium species including short saturated a, C₂₀₋₂₅, and a longer meromycolate chain, the β-hydroxy branch C₆₀, comprising double bonds, cyclopropane rings and oxygenated groups (Payne et al., 2009).

[0004] MA are found in two forms: unbound and bounded. The first is: unbound which are glycolipid esters of trehalose forming trehalose monomycolate (TMM) and trehalose dimycolate (TDM; also called the cord factor) which has a key role in mycobacterial pathogenesis (Bhamidi et al., 2008; Brennan, 2003). The second form of MA is bounded via ester linkage with the terminal pentaarabinofuranosyl units of arabinogalactan (AG), the polysaccharide that together with peptidoglycan, forms the insoluble cell wall skeleton (Brennan & Nikaido, 1995; Daffe, 2008; Daffe, 1996; Hoffmann et al., 2008; Mcneil et al., 1990; Niederweis, 2008). Both forms of MA impart impermeability to the cell envelope and participate in the two leaflets of the mycobacterial outer membrane, the mycomembrane (Sani et al., 2010; Zuber et al., 2008).

[0005] The mycomembrane imparts hydrophobicity that results in decreased permeability to nutrients and antimycobacterials making TB difficult to treat (Jarlier & Nikaido, 1990). It is also essential for cell viability, hence the target of antituberculosis (anti-TB) drugs (Vilcheze & Jacobs, 2007). Due to the unique structure of the mycomembrane envelope it is considered a key target for novel antimycobacterials. Tuberculosis drugs target various aspects of Mycobacterium tuberculosis biology, including inhibition of cell wall synthesis, protein synthesis, or nucleic acid synthesis. For some drugs, the mechanisms of action have not been fully identified. The major action of anti-TB drugs is via affecting lipids, glycolysis, nucleic acid synthesis and inhibition of mycolic acid biosynthesis. Anti-TB drugs target the energy system of cells and/or inhibit synthesis of cell wall components. They act intracellularly, and so need to be internalised/trafficked into the target cells. Accordingly, anti-TB drugs are typically ineffective on dormant/latent cells.

[0006] The use of endolysins as antibacterial enzymes is increasingly considered for the treatment of bacterial infections. Endolysins are peptidoglycan degrading enzymes produced by phages at the end of the lytic replication cycle. They degrade the cell wall of the infected cells, which eventually results in lysis and dispersion of the viral progeny. The natural function of these endolysins can be exploited to use them as powerful enzyme-based antibiotics, also coined ‘enzybiotics’. Exogenous application of recombinant endolysins to Gram-positive bacteria rapidly induces osmotic lysis and consequent cell death.

[0007] In the last two decades, endolysins have proven their efficacy in different models of infection in animals (Nelson et al., 2012) and bacterial contamination in food (Schmelcher et al., 2012). A key feature of endolysins is their modularity and the opportunities that emerge thereof to customize properties of endolysins such as specificity, activity, stability and solubility (Gerstmans et al., 2018). Initially, endolysins were only explored for Gram-positive pathogens as their thick peptidoglycan layer is immediately accessible from the outside. However, protein engineering is being applied to expand the antibacterial spectrum of endolysins to Gram-negative bacteria. Fusion proteins of a single, specific endolysin (KZ144 from Pseudomonas aeruginosa bacteriophage varphiKZ) acting against the peptidoglycan layer of Gram-negatives and a selected outer membrane permeabilizing peptide kill Gram-negative bacteria through local destabilization of the outer membrane, followed by passage of the fusion protein across the outer membrane and degradation of the peptidoglycan layer. This results in immediate cell death through osmotic lysis (Briers et al., 2014). These fusion proteins are called ‘Artilysins’. In addition, a similar protein engineering strategy has been applied to endolysins against Gram-positive pathogens, resulting in engineered endolysins that kill faster, with higher activity (+2 log) and potency.

[0008] The complex nature of the mycobacterial cell wall, comprising peptidoglycan, arabinogalactan and mycolic acid layers (FIG. 1), poses a major obstacle for antibiotics in general and has hindered the expansion of enzybiotics toward Mtb until today.

[0009] Mycobacteria can be infected by several viruses known as mycobacteriophages that face the same challenge of the unusual structure of the cell wall and are therefore equipped with two different and separate types of enzymes to lyse the mycobacterial cell wall: (1) LysA hydrolyses the peptidoglycan layer (peptidoglycan hydrolase enzymes, also termed endolysins), and (2) LysB cleaves the ester linkage of mycolic acids to the arabinogalactan layer (mycolyl arabinogalactan esterase enzymes that are not typically considered as conventional endolysins, but can instead be categorized as enzymes with lipolytic activity). Although these enzymes are encoded in a lysis cassette in mycobacteriophages, arranged as protein coding gene segments in tandem, they are released as separate proteins and do not exist in nature as fusion proteins.

[0010] LysB-D29 enzyme (without any antimicrobial peptide present) showed synergistic effect with anti-TB drugs; Rifampicin (also known as rifampin), Ethambutol and Isoniazid in subminimal concentrations (concentrations which inhibited the growth, but did not show any bactericidal effect) against M. smegmatis and Mycobacterium bovis bacillus Calmette-Guerin (BCG) (Sharma, 2017). Similarly, in comparison with Sharma, WO 2017/023680 A1 used peptides comprised of LysB only, in the context of treating acne.

[0011] However, recent evidence has highlighted that LysB peptides alone are insufficient to have antimycobacterial activity (Abouhmad et al, 2020), even when used in combination with anti-TB drugs. Instead, combination with outer membrane permeabilisers, such as colistin and protamine, were required to observe antimycobacterial properties, potentially due to the mycobacterial membrane being highly hydrophobic and thick.

[0012] In other studies, two types of peptides are exemplified (Miller, 2015), each of which consist of: (i) an antimicrobial peptide (AMP), LysA and a protein transduction domain (PTD); or (ii) an AMP, LysB and a PTD. However, these fusions of antimicrobial peptide with either LysA or LysB individually did not exert antimycobacterial activity (Miller, 2015). When these peptides were combined as a mixture post expression and purification, antimycobacterial activity was detected. In this study, Miller was limited to the use of a TrxA tag to enhance the solubility of their peptides.

[0013] There remains a need for improved peptides which are capable of disrupting cell envelopes, such as those of mycobacteria, in order to exert an antimicrobial effect.

### BRIEF SUMMARY OF THE INVENTION

[0014] As discussed, the peptides known in the art do not comprise all the necessary activities within a single peptide due to various complications, such as steric hindrance of multiple units comprised in a fusion peptide. The polypeptides provided herein are comprised of all necessary activities within a single polypeptide while retaining the necessary function of antimicrobial (e.g. antimycobacterial) activity.

[0015] The present invention, for the first time, provides peptides comprising at least three domains, as follows: (i) a domain with activity specific to a peptidoglycan or component thereof; (ii) a domain with activity specific to an ester linkage; and (iii) a domain with membrane permeabilising, destabilizing and/or disrupting activity. Such peptides are capable of targeting complex cell envelopes comprised of multiple components, as shown in FIG. 1.

[0016] A benefit of peptides of the present invention over antimicrobials (such as anti-TB drugs) is that the peptides are able to act against dormant/latent cells. A further benefit of the peptides is their increased specificity and selectivity to bacteria comprised of the aforementioned complex cell walls, for example mycobacteria. Another benefit is that the fusion peptides (comprising AMP, LysA and LysB) have surprisingly a faster expression rate compared with AMP-LysA and AMP-LysB; and improved inhibitory activity compared with a mixture of corresponding AMP-LysA and AMP-LysB mixtures.

[0017] The inventors surprisingly found that all three domains/functions could be provided in a single peptide.

[0018] The peptides of the present invention comprise activity specific to a peptidoglycan or component thereof, which enables them to effectively target bacteria with cell walls further comprising a peptidoglycan layer. The peptides also comprise a membrane permeabilising, destabilizing and/or disrupting domain (such as an antimicrobial peptide (AMP)) to further enhance their antibacterial activity. Additionally, in one embodiment, singular peptides of the present invention are capable of killing their target bacteria, which contrasts to peptides of the prior art which require the combination of multiple different peptides to kill target bacteria.

### DETAILED DESCRIPTION OF THE INVENTION

[0019] The present invention relates to a peptide comprising three domains:
[0020] (i) a domain with activity specific to a peptidoglycan or component thereof;
[0021] (ii) a domain with activity specific to an ester linkage; and
[0022] (iii) a domain with membrane permeabilising activity.

[0023] A “component thereof” may also be referred to as a “portion thereof” herein. These domains may be referred to as a first, second or third domain, respectively. However, a first domain is not to be construed as limited to activity specific to a peptidoglycan or component thereof. For example, the first domain may have activity specific to an ester linkage and/or membrane permeabilising activity. However, the peptides of the invention are at least capable of all three activities as listed above. Additionally, the first, second and third domains can be present in any order in the peptide.

[0024] Accordingly, a first aspect of the invention is a peptide comprising a first domain with activity specific to a peptidoglycan or component thereof; a second domain with activity specific to an ester linkage; and a third domain with membrane permeabilising activity.

[0025] By “activity specific” we include the meaning that the domain is capable of specifically binding or associating with a second entity (i.e. a target), and/or that the domain enacts a change (for example, the breakdown of the target entity) on a second entity. For example, a domain with activity specific to peptidoglycan would include a domain that induces peptidoglycan hydrolase activity.

[0026] Accordingly, in one embodiment a first aspect of the invention is a peptide comprising:
[0027] a first domain that is:
   [0028] a) capable of specifically binding to a peptidoglycan or component thereof; and/or
   [0029] b) capable of specifically associating with a peptidoglycan or component thereof; and/or
   [0030] c) capable of enacting a change in a peptidoglycan or component thereof;
[0031] and a second domain that is:
   [0032] a) capable of specifically binding to an ester linkage; and/or
   [0033] b) capable of specifically associating with an ester linkage; and/or
   [0034] c) capable of enacting a change in an ester linkage;
[0035] and a third domain with membrane permeabilising, destabilizing and/or disrupting activity.

[0036] A “peptide” or “polypeptide” is used herein interchangeably in its broadest sense to refer to a compound of two or more subunit amino acids, amino acid analogs, or other peptidomimetics. The term “peptide” thus includes short peptide sequences and also longer polypeptides and proteins, including variants and fusions thereof. As used herein, the term “amino acid” refers to either natural and/or unnatural or synthetic amino acids, including both D or L optical isomers, and amino acid analogs and peptidomimetics.

[0037] It will be appreciated by persons skilled in the art that the term “amino acid”, as used herein, includes the standard twenty genetically-encoded amino acids and their corresponding stereoisomers in the ‘d’ form (as compared to the natural ‘I’ form), omega-amino acids other naturally-occurring amino acids, unconventional amino acids (e.g., α,α-disubstituted amino acids, N-alkyl amino acids, etc.) and chemically derivatised amino acids (see below).

[0038] When an amino acid is being specifically enumerated, such as ‘alanine’ or ‘Ala’ or ‘A’, the term refers to both I-alanine and d-alanine unless explicitly stated otherwise. Other unconventional amino acids may also be suitable components for polypeptides of the present invention, as long as the desired functional property is retained by the polypeptide. For the peptides shown, each encoded amino acid residue, where appropriate, is represented by a single letter designation, corresponding to the trivial name of the conventional amino acid.

[0039] A domain may be a “binding domain”, which includes the meaning of any peptide sequence that is capable of binding or associating with a second entity. In the case of the first domain, the domain is able to bind specifically to a peptidoglycan or component thereof; in the case of the second domain, the domain is able to bind specifically to an ester linkage and/or to a peptidoglycan or component thereof; and in the case of the third domain, the domain is able to bind specifically to a cell membrane or component thereof (for example, glycolipids (such as Lipoarabinomannan, TDM, TMM), mycolic acids, phospholipids, etc), such as an outer and/or inner leaflet component of a cell membrane. For example, the third domain may be able to bind to glycolipids and/or phospholipids and/or mycolic acids exposed on a cell membrane.

[0040] By “bind specifically” we include the meaning that the domain (or the peptide comprising at least one domain) binds to its target in a manner that can be distinguished from binding to non-target domains (i.e. off-targets). For example, a domain that binds specifically may refer to a domain that binds with higher specificity for the intended target compared with that of a non-intended target. Specificity can be determined based on dissociation constant through routine experiments. A domain being “specific for” a target is intended to be synonymous with a domain “directed against” said target. By “binding specifically” we also include the meaning that the domain has binding affinity specific to its target. Binding affinity or specificity in the context of a domain may be to a particular component part of a cell wall, for example, whereas binding affinity or specificity in the context of a peptide comprising at least one domain may be to a particular cell wall.

[0041] Binding affinity may be quantified by determining the dissociation constant (Kd) for a peptide or domain thereof and its target. Similarly, the specificity of binding of a peptide or domain thereof to its target may be defined in terms of the comparative dissociation constants (Kd) of the peptide or domain thereof for its target as compared to the dissociation constant with respect to the peptide or domain thereof and another, non-target molecule.

[0042] Typically, the Kd for the peptide or domain thereof with respect to the target will be at least 2-fold, preferably 5-fold, more preferably 10-fold less than Kd with respect to the other, non-target molecule such as unrelated material or accompanying material in the environment. More preferably, the Kd will be 50-fold less, even more preferably 100-fold less, and yet more preferably 200-fold less.

[0043] The value of this dissociation constant can be determined directly by well-known methods, and can be computed even for complex mixtures by methods such as those, for example, set forth in Caceci et al. (Byte 9:340-362, 1984). For example, the Kd may be established using a double-filter nitrocellulose filter binding assay such as that disclosed by Wong & Lohman (Proc. Natl. Acad. Sci. USA 90, 5428-5432, 1993).

[0044] A method for the evaluation of binding affinity for a peptide or domain thereof may be by ELISA. Other standard assays to evaluate the binding ability of peptides or domains thereof towards targets are known in the art, including for example, Western blots, RIAs, and flow cytometry analysis. The binding kinetics (e.g., binding affinity) of the peptide or domain thereof also can be assessed by standard assays known in the art, such as by surface plasmon resonance (e.g. Biacore™ system) analysis.

[0045] A competitive binding assay can be conducted in which the binding of the peptide or domain thereof to the target is compared to the binding of the target by another, known ligand of that target, such as an antibody. The concentration at which 50% inhibition occurs is known as the Ki. Under ideal conditions, the Ki is equivalent to Kd. The Ki value will never be less than the Kd, so measurement of Ki can conveniently be substituted to provide an upper limit for Kd.

[0046] A peptide of the invention or domain thereof is preferably capable of binding to its target with an affinity that is at least two-fold, 10-fold, 50-fold, 100-fold or greater than its affinity for binding to another non-target molecule.

[0047] Preferably the binding domain will bind only to its respective target, as specified above, and will not bind to any other molecule in the environment, for example in the human body. However, it will be appreciated that some degree of off-target binding may be tolerated, and the skilled person will understand how to determine whether a particular binding activity is of the required specificity or not.

[0048] A peptide of the invention is preferably capable of being expressed at a faster rate than AMP-LysA and/or AMP-LysB peptides made up of the corresponding domains. Despite the presence of additional active domains, the peptides of the invention are surprisingly not toxic to hosts such as E. coli, and so it is possible to express them in such systems without arresting host growth due to toxicity. The skilled person will realise then that the ability to express the peptides of the invention without any apparent toxicity means that the cells are able to grow faster and to a higher cell density and so overall increased peptide yield than cells expressing a toxic protein that affects the growth rate of the cell. On the other hand, AMP-LysA and/or AMP-LysB peptides are toxic to E. coli, which results in arresting cell growth and so a reduced overall peptide yield. Therefore, in some embodiments, a peptide of the invention is non-toxic to non-mycobacterial hosts, such as E. coli. The skilled person will appreciate that the toxicity of an agent can be determined by monitoring the effects of the agent on the growth of the expression host cell, and that the growth rate of a cell or culture of cells can be determined by monitoring the optical density of a culture of cells at the appropriate wavelength. For example in some embodiments, the peptide of the invention does not affect the growth rate of the expression host cell. In some embodiments the peptide of the invention reduces the growth rate of the expression host cell by less than 40%, for example by less than 35%, 30%, 25%, 20%, 15%, 10%, 5% or less than 2%. The skilled person will appreciate that the growth rate of a cell culture is typically determined during the logarithmic growth phase.

[0049] In some embodiments the peptide of the invention is less toxic to an expression host cell than the corresponding AMP-LysA and/or AMP-LysB peptides made up of the corresponding domains. The skilled person will appreciate that when comparing the toxicity of different peptides, the same amount of each peptide ought to be used. As described above, the toxicity of a peptide can be determined by monitoring the growth rate of a culture of host expression cells grown in the presence and in the absence of said peptide. In some embodiments the fusion peptide of the invention may be at least 50% less toxic, or greater, such as 60%, 70%, 80% or 90% less toxic than the corresponding AMP-LysA and/or AMP-LysB peptides made up of the corresponding domains—i.e. the fusion peptide reduces the growth rate of the expression host cell less than the corresponding AMP-LysA and/or AMP-LysB peptides. By having lower toxicity to the host in which the peptides are being expressed, the expression rate or overall yield can be increased for the peptide. As discussed above, the expression rate can be determined based on optical density (OD_{625 nm}) of the bacteria in which the peptide is being expressed, i.e. the culture density positively correlates with protein expression level. For example, a peptide of the invention, in comparison with AMP-LysA and/or AMP-LysB peptides made up of the corresponding domains, may be expressed at least 10 times (10×) faster, 9× faster, 8× faster, 7× faster, 6× faster, 5× faster, 4× faster, 3× faster or 2× faster. The rate of expression may be portrayed relative to time. For example, the rates described above may be after 1 hour, 2 hours, 3 hours, 4 hours, 5 hours, 6 hours, 7 hours, 8 hours or more of incubation in LB medium.

[0050] A peptide of the present invention preferably has a higher level of inhibitory activity against mycobacteria compared with AMP-LysA and/or AMP-LysB peptides made up of the corresponding domains. In some embodiments, a peptide of the present invention has an inhibitory activity against mycobacteria that is, compared with AMP-LysA and/or AMP-LysB peptides made up of the corresponding domains, ≥2 times (2×) higher, ≥3× higher, ≥4× higher, ≥5× higher, or more. Inhibitory activity may be assessed using known techniques, such as those used in Example 4 of the present specification.

[0051] A domain (e.g. a first domain) with activity specific to a peptidoglycan or component thereof may be an enzyme or a domain derived from an enzyme which retains the functional activity of the enzyme, e.g. an enzyme active domain (EAD), also referred to as an enzymatically active domain. Thus, in one embodiment, the first domain exerts enzyme activity on a peptidoglycan or component thereof. In one embodiment the domain is a lysin, for example an endolysin (which may be categorised as a structural endolysin, modular endolysin, and/or globular endolysin). The term “structural endolysin” may also be referred to as structural lysin, virion-associated lysin (VAL), or virion-associated peptidoglycan hydrolases (VAPGH). By “activity specific to a peptidoglycan or component thereof” we include the meaning that the domain is capable of binding or associating with a peptidoglycan or component thereof, and/or that the domain enacts a change (for example, the breakdown of the target entity) on a peptidoglycan or component thereof. For example, the domain may be capable of cleaving peptidoglycan bonds in the cell wall. The endolysin may be a peptidoglycan hydrolase enzyme, for example a LysA and/or at least one enzyme active domain (EAD) thereof. Additionally, or alternatively, the domain with activity specific to a peptidoglycan or component thereof may be a tail fibre protein with peptidoglycan hydrolysing activity, such as a structural endolysin. Additionally, or alternatively, the domain with activity specific to a peptidoglycan or component thereof may not be considered an endolysin, for example the domain may be at least one lysozyme and/or autolysin.

[0052] The targeting of the peptidoglycan layer may be achieved by at least one lysin, for example at least one endolysin, such as at least one LysA. LysA are made up of EAD that may have mechanisms of actions corresponding to amidase, endoamidases, transglycosylase (such as lytic transglycosylases), chitinase, muramidase (such as N-acetylmuramidase), glycoside hydrolase, glycosidase (glucosaminidases, e.g. N-acetyl-β-D-glucosaminidase), DD and DL carboxypeptidase, transpeptidases, epimerase, lysozyme, L-alanoyl-D-glutamate (LD), m-DAP-m-DAP (LD) D-alanyl-D-alanine carboxypeptidase and peptidase (such as N-acetylmuramoyl-L-alanine amidase, D-Alanine-meso-Diaminopimelic (DD) endopeptidase, c-D-glutamyl-meso-diaminopimelic acid (DL) peptidase, L-Alanine-D-Glutamate peptidase, cysteine protease), and γ-D-glutamyl-meso-diaminopimelic acid (DL) peptidase activity. The EAD present in a LysA may vary. For example, a LysA may comprise EAD with at least amidase, transglycosylase, chitinase, muramidase or peptidase activity, such as a LysA comprising only EAD with amidase and chitinase activity. Accordingly, in one embodiment, the targeting of the peptidoglycan layer is with LysA.

[0053] Alternatively, or additionally, the targeting of the peptidoglycan layer may be achieved using at least one EAD derived from a LysA. EAD derived from LysA may be fused with any other domain component contemplated herein. EAD derived from LysA may be fused to further LysA and/or EAD derived from LysA. For example, a first EAD derived from LysA with amidase activity may be fused to a second EAD derived from LysA with muramidase activity. Fusions may comprise 1, 2, 3, 4, 5, 6, 7, 8, 9, 10 or more EAD derived from LysA. “Derived from LysA” is to be construed as encompassing EAD derived from the same LysA or from different LysA. For example, a first EAD (with any of the above listed activities) derived from a first LysA may be fused with a second EAD (with any of the above listed activities, whether the same or different compared with the first EAD) derived from the first and/or a second LysA. Exemplary EAD include amino acid sequences corresponding to SEQ ID NOs: 326-338, as encoded by the nucleic acid sequences corresponding to SEQ ID NOs: 313-325, respectively.

[0054] The domain targeting the peptidoglycan layer may further comprise at least one cell wall binding domain (CBD). The CBD may be specific for the target cells of interest. For example, the CBD may confer specificity of a peptide to at least one mycobacteria. Alternatively, or additionally, the CBD may be classified as one that does not have specificity for Gram-negative bacteria and/or Gram-positive bacteria. For example, the CBD of a peptide described herein may be specific for mycobacteria only and not specific for Gram-negative bacteria. Multiple CBD may be present, for example as tandem repeats, and/or as multiple copies at different positions within a peptide. The presence of multiple CBD may refer to multiple copies of the same CBD and/or different CBD. For example, a peptide may comprise multiple copies of a first CBD and only one copy of a second (or further) CBD; or comprise multiple copies of a first CBD and multiple copies of a second (and/or further) CBD.

[0055] The CBD selected for use in a peptide of the present invention will depend on the intended target (or targets) of the peptide. For example, the most suitable CBD for treating M. abscessus may be a CBD derived from a mycobacteriophage that is capable of infecting M. abscessus. In some embodiments, the CBD may be capable of targeting multiple species (e.g. species of mycobacteria) based on those species sharing the targeting domain of said CBD. In some embodiments, the CBD will be determined based on the domain targeting the peptidoglycan layer. For example, if the domain targeting the peptidoglycan layer is a LysA, this may imply that the CBD is the CBD known to be associated with that specific LysA. In other cases, the CBD of a particular LysA could be swapped for (or supplemented with) a CBD from a different LysA to allow the activity of the LysA to be targeted to a different mycobacteria.

[0056] Therefore in one embodiment, the domain targeting the peptidoglycan layer is a LysA comprising a CBD. For example, in one embodiment the LysA CBD may be PGBD (Putative peptidoglycan binding domain) (pfam01471). In another embodiment, the LysA CBD may be a LGFP motif (pfam08310; superfamily cl07065).

[0057] In one embodiment, the amino acid sequence of the domain targeting the peptidoglycan layer may be selected from any one or more of SEQ ID NOs: 2, 4, 6, 8, 10, 12, 14 or 326-338; or may be encoded by any one or more of the nucleotide sequences of SEQ ID NO: 1, 3, 5, 7, 9, 11, 13 or 313-325, as follows:

Length: 1566
Type: DNA
Other information: LysA-BTCU-1
Sequence ID No: 1
ATGACAGAGCGTGTCCTGCCGTATGATCGTAATATTGTACCACAAGAAACGGGTTGGTGGTGCGGTCCGGCAGCG
ACGCAAGTTGTTCTGAATAGTCGTGGAATTATTGTACCGGAAGCGACCCTGGCAAATGAAATTGAACAAATTGAA
AATCCAGGTCGCGGTGACGATCGTGATGGAACGGATTATGTGGGGCTTATTGAACAAGTGCTTGATCGCCGTGTG
CCCGAAGCGAAATATACGAGCGTGTATATGCCTAATGATCCGCCCACCGCAGCCCAACGCGAAGCTTTATGGCAA
AATATTGTGCGCTCCATTAATGCGGGCTGGGGTGTCATTATGAATTGGGTGGCGCCGCCATCCAATAAACCACGC
GGAGTCAAAGGTAGCCCCAATCCTAAATATTCAGGTGGTACAACTTATCATTATGTGGCCTGTATGGGTTATGAT
GATACTCCGGGCGCCCGCGCCTTGTGGATTGCGGATTCTGGGTTTCAACCCTTTAATTATTGGATTTCGTTTGAT
CAAGCAGCAACGCTCATTCCACCTAAAGGGTATGCGTATGCCGCGACGACGGCTACAGCTCCTGCGCCGGCTCCA
GCCCCTGTTGATGCGGCACCCATTTTAGCACGCGCAGCTGGGATTAGCGAAGCTAAAGCACGTGAAATCTTACCC
ACCTTTCGTGATGGTTTGCGCTTAGCTGAATGTAATAATGTTCCGCGCATTGCAATGTTTATTGCACAAACAGGC
CACGAAAGCGATAATTTTAATGCCACTCAAGAATATGATCATGGCCGTAATTATGGCGATCCAAATGAAGCAACC
GATCGTTGGAAATATAAAGGGCGTACGTGGATCCAAATTACATGGCGTGGTAATTATGAGCGTTTCTCACGTTGG
TGTTTTGATCGTAAATTGGTGCCTACCCCAACATATTTTGTAGATAATCCACGCGCACTCGCGGATGTTCGTTGG
GCAGGAATTGGCGCGGCGTGGTATTGGACGGTAGAACGTCCTTCCATTAATCGCCTGTGTGATGAGCGTAATTTA
ACGGAAGTTACTCGTCTGATTAATGGTGGCACATCGTGGGAAGCCCCAACCTGGATGAAACATCGTAAAGAACGT
TATGATCGTGCGTTAGCTGTGGGTAATGATCTTTTAAAGCTGTTAGATGGCGAAGAAGAAGGGTTTCTGTCGGCG
CTTACGCCGAAAGAGCAACGTGAACTTTATGATGAAATTATGAAACGTGGGCCTAGCCGTAGCTTTCTTGCGGAT
GATGGTCGTCAAATCGAAACGCTGCTCGGTTTTATTTATAATATTGATGGAAATGCGTGGAATATTGTGAATATT
CTTGGTTGTTTGATTGGTGTACCAGAGTGTGTCGATGATATTCGTGACGTTGCCGAAAATGGAGTACGTAAAGGT
TCATATGCAGAAAGTAATCCCTGGCTCGCGCAATTTGGTCAAGAATTTTGTAAACGTTTGCTTCCCCTTGCTGGT
AAACTGTCTGAACTCTTGAATGCACAAGAATTTAAGGTTACACATAATCGCATTATTGAACAATGA
Length: 521
Molecular weight: 58.59 kDa
Type: protein
Feature: contains the following domains:
Peptidase C39 like domain; 16→152
Lysozyme like domain; 209→385
Other information: LysA-BTCU-1
Sequence ID No: 2
MTERVLPYDRNIVPQETGWWCGPAATQVVLNSRGIIVPEATLANEIEQIENPGRGDDRDGTDYVGLIEQVLDRR
VPEAKYTSVYMPNDPPTAAQREALWQNIVRSINAGWGVIMNWVAPPSNKPRGVKGSPNPKYSGGTTYHYVACMG
YDDTPGARALWIADSGFQPFNYWISFDQAATLIPPKGYAYAATTATAPAPAPAPVDAAPILARAAGISEAKARE
ILPTFRDGLRLAECNNVPRIAMFIAQTGHESDNFNATQEYDHGRNYGDPNEATDRWKYKGRTWIQITWRGNYER
FSRWCFDRKLVPTPTYFVDNPRALADVRWAGIGAAWYWTVERPSINRLCDERNLTEVTRLINGGTSWEAPTWMK
HRKERYDRALAVGNDLLKLLDGEEEGFLSALTPKEQRELYDEIMKRGPSRSFLADDGRQIETLLGFIYNIDGNA
WNIVNILGCLIGVPECVDDIRDVAENGVRKGSYAESNPWLAQFGQEFCKRLLPLAGKLSELLNAQEFKVTHNRI
IEQ
Length: 1434
Type: DNA
Other information: LysA-Bxb1
Sequence ID No: 3
ATGCCTCGCGTGGTCTATGGTCTTACACATTCTAGCAATGGCTGGCCTATGCTGAACTCGGACGAATGTGAATGG
ACCAAAATTCCGGGGACGTCAGTAACCTTACAAATTGCGAAAGGACAACCGCTGGCAATTTTGCGTGCTTTTGCG
GCAGATTTTCATGCTTATGTTGAACCTCTCCGTGATGCTGATAGTGCCTGTTGGACACCAACAAATAGTGTTCCC
AGCTCGAATCATTTGTCTGGAACTGCAATGGATCTTAATTGGAATACACATCCTTTTCAAGTTCCCGATGCGGGT
TTTGATGCTGCCAAGAAGGCTCGTGTAAAGGAACTGTTGGATTTCTATGAAGGAATGGTCTTTTGGGGTAATGAT
TGGAGCTCACCGAAAGACGCAATGCATTTTCAACTGGCTTCCTTACGTAATGGTGGCACGTTTGACACGTATGGT
AATCCCAAAACGGCTGATTTTATTGCCCGTAAAATTCGTGCCGATGGATATTCTACGTTTCGTCGTGGATCAGCG
CCTGCCTCAGCCGCGCCAATTTTGGCAGCAGCGACGGGTCTTTCGGAAGCGCGTGCCGCAGAAATTTTACCAGCA
GTGCGTAGCGGTCTGCGTGAGAGTGAATGTACTAATGTGAATCGTATTGCCATGTGGTTGGCGCAAATTGGCCAC
GAGAGCGGAAGTTTTCAATATACAGAAGAAATTGCGAAGAATGGTCGCTATGCACCATATATTGGTCGCACCTGG
ATCCAAATTACTTGGGATTATAATTATCGTTCTTTTAGCCAATGGGCCTATGCCTTTGGTATGGTCCCTACACCA
GATTATTTTGTTGTAAATTATCGTGAACTGGCGGACTTAAAATGGGCCGGAATTGGTCCGGCGTGGTATTGGACT
GTTGCGCGTCCCGATATTAATGAATTAAGTGATCGTCGTGATTTGAATACCGTAACTCGTCGCATTAATGGTGGT
ACGAATGGTCTGGCTGACCGCCAGGCGCGTTATAATCGTGCATTGGCTCAAGGTGACGCCCTCTTGCAGCTGTTG
CATGAGGAAGATGATTTTCTGTCAGCGTTAACGGATGCCGAGCAACGCGAACTGCTCGATTTAGCCCGTCAACAA
GCGAAATATAAACGTAAAAGCCGTAGCCCCTTACATTGGCCTCATGAAGGTGAAGTTGATACAATTGCGGGATTG
AGCTGGTCTACCGATGCAAATGTTCACATTCAATTAGTTGAAAAGCTGGCAGTTATTTATGGGGATCCCGTTAGC
ATTGCACTTTTATATGCCGTTTCCAATTCGGATGACCCTACCAATAATCCGGAATTAGCCAAACGTATTTTAAAA
CGTGTGAAACCGGAAGATATTACGGCAGCCCAAGTGCAAATTCAAAAGTGGCTCGCGGCGGAACAGAAATTTCAC
GCGGCGTGA
Length: 477
Molecular weight: 53.32 kDa
Type: protein
Feature: contains the following domains:
Peptidase_M15; D-alanyl-D-alanine carboxypeptidase, L-Ala-D-Glu
peptidase; 12→137
Glycoside hydrolase family 19 (GH19), Lysozyme like domain
superfamily; 190→347
Cell wall binding domain; 382→464
Other information: LysA-Bxb1
Sequence ID No: 4
MPRVVYGLTHSSNGWPMLNSDECEWTKIPGTSVTLQIAKGQPLAILRAFAADFHAYVEPLRDADSACWTPTNSVP
SSNHLSGTAMDLNWNTHPFQVPDAGFDAAKKARVKELLDFYEGMVFWGNDWSSPKDAMHFQLASLRNGGTFDTYG
NPKTADFIARKIRADGYSTFRRGSAPASAAPILAAATGLSEARAAEILPAVRSGLRESECTNVNRIAMWLAQIGH
ESGSFQYTEEIAKNGRYAPYIGRTWIQITWDYNYRSFSQWAYAFGMVPTPDYFVVNYRELADLKWAGIGPAWYWT
VARPDINELSDRRDLNTVTRRINGGTNGLADRQARYNRALAQGDALLQLLHEEDDELSALTDAEQRELLDLARQQ
AKYKRKSRSPLHWPHEGEVDTIAGLSWSTDANVHIQLVEKLAVIYGDPVSIALLYAVSNSDDPTNNPELAKRILK
RVKPEDITAAQVQIQKWLAAEQKFHAA
Length: 1482
Type: DNA
Other information: LysA-D29
Sequence ID No: 5
ATGACCTTGATTGTAACGCGCGACCATGCGCAATGGGTACACGACATGTGTCGTGCCCGTGCGGGTAATCGTTAT
GGGTATGGTGGTGCCTTTACCCTGAATCCGCGTGATACGACGGATTGTTCAGGATTAGTGTTACAAACCGCCGCG
TGGTATGGTGGCCGTAAAGATTGGATTGGCAATCGCTATGGATCAACCGAATCCTTTCGCTTAGATCATAAAATT
GTTTATGATTTAGGATTTCGCCGTCTGCCACCCGGCGGTGTCGCAGCGCTCGGCTTTACGCCTGTGATGCTGGTG
GGATTACAACATGGTGGTGGTGGTCGCTATAGCCATACTGCGTGTACCCTCATGACCATGGATATTCCGGGCGGT
CCAGTAAAAGTATCACAGCGTGGTGTTGATTGGGAAAGCCGTGGTGAGGTGAATGGGGTTGGCGTATTCTTATAT
GATGGTGCCCGTGCGTGGAATGATCCTCTGTTTCATGATTTCTGGTATTTGGATGCCAAATTGGAAGATGGTCCT
ACCCAATCCGTGGATGCAGCAGAGATTCTGGCGCGTGCCACCGGACTGGCATATAATCGCGCTGTCGCCTTACTT
CCTGCGGTCCGCGACGGGTTAATTCAAGCAGATTGTACGAATCCTAACCGTATTGCCATGTGGCTGGCTCAAATT
GGACACGAATCTGATGACTTTAAAGCAACAGCAGAATATGCGAGTGGCGACGCATATGATACTCGTACAGATTTG
GGGAATACTCCCGAAGTTGATGGTGATGGACGCCTGTATAAAGGACGCAGTTGGATTATGATTACTGGGAAAGAT
AATTATCGCGATTTTAGTCGCTGGGCGCATGGGCGCGGGCTTGTACCGACACCTGATTATTTTGTCGTGCATCCT
TTGGAACTTAGCGAATTACGTTGGGCCGGAATTGGCGCAGCTTGGTATTGGACTGTGGAACGTCCGGATATTAAT
GCGTTATCGGATCGTCGTGATCTGGAGACTGTGACTCGTCGTATTAATGGCGGTCTGACGAATCTGGACGATCGT
CGCCGTCGCTATAATTTAGCGCTGGCAGTTGGGGATCAGCTGTTAACCCTCATTGGTGACGATGATGAGCTGGCG
GACCCGACCATCCAACGTTTTATTCGTGAAATTCATGGTGCCCTCTTTAATACAGTGGTTACACAAAGCCCTTAT
GGTGATCCCCAAAATCCCGATGGTTCAGAACCGCGCTCCAATCTTTGGCAACTGCACGAATTGATTAAGAATGGT
GATGGAATGGGCCATGCGCGTTATGTGGAAGAGAGTGCACGCGCTGGCGATCTGCGTGAATTAGAACGTGTGGTG
CGTGCGGCGAAAGGTTTAGGCCGCGACCGTTCGCCGGAATTTATTGCCCGTGCGCGTAATGTACTTGCACAAATT
GAAGCCGCGAATCCGGAATATCTGCAAGCCTATATTGCGCGCAACGGCGCGTTATGA
Length: 493
Molecular weight: 54.82 kDa
Type: protein
Feature: contains the following domains:
Cystine protease; 20→156
Glycoside hydrolase family 19 (GH19); 398→483
Cell wall binding domain; 200→365
Other information: LysA-D29
Sequence ID No: 6
MTLIVTRDHAQWVHDMCRARAGNRYGYGGAFTLNPRDTTDCSGLVLQTAAWYGGRKDWIGNRYGSTESFRLDHKI
VYDLGFRRLPPGGVAALGFTPVMLVGLQHGGGGRYSHTACTLMTMDIPGGPVKVSQRGVDWESRGEVNGVGVFLY
DGARAWNDPLFHDFWYLDAKLEDGPTQSVDAAEILARATGLAYNRAVALLPAVRDGLIQADCTNPNRIAMWLAQI
GHESDDFKATAEYASGDAYDTRTDLGNTPEVDGDGRLYKGRSWIMITGKDNYRDFSRWAHGRGLVPTPDYFVVHP
LELSELRWAGIGAAWYWTVERPDINALSDRRDLETVTRRINGGLTNLDDRRRRYNLALAVGDQLLTLIGDDDELA
DPTIQRFIREIHGALFNTVVTQSPYGDPQNPDGSEPRSNLWQLHELIKNGDGMGHARYVEESARAGDLRELERVV
RAAKGLGRDRSPEFIARARNVLAQIEAANPEYLQAYIARNGAL
Length: 1461
Type: DNA
Other information: LysA-DS6A
Sequence ID No: 7
ATGATGTTGACGGTCGAGTCTTTCGCCGCTGCTATGGGTAATTCACTGTCTGTAGACCGTTATCGCCAGCTTTTC
CCAGCAGCTGTTGAGTCTATGGTTGCCTGCGGTTGTACTACCGTTAATCGCGCGGCAATGTGGCTTGCACAGGTA
GGGCACGAGTCCGGGGGTCTGCGTTGGATGGAGGAGCTGGCCAGCGGAGCCGCTTACGAGTGGCGCTCTGATTTA
GGCAACACTCAGGCAGGAGATGGGGTCCGCTTTAAAGGTCGTGGGCCTATTCAAATTACGGGACGTTACAACTAC
CGTAAGGTGAGCGAATGGGCGCATGCACAAGGCATCGTCCCTACGCCAACCTACTTTGTGGATAATCCTACTCAA
CTGGCAAGTGATCAATATGGTTTTATCGGGGTCTCGTGGTATTGGCAACATGGGGGGCCACGTCCAGGCCAAATC
AATGGCTTCGCCGACGCAGGAGATATTTTATCCGGTTCGCGCTGTGTAAATGGGTGGGTAACGACCCCAAATGGC
ATGCCGGACCGCACCGAGCGTTGGAACCGTTGTCGTGCAATGGGCGACCAAATCCTTCCAGCAGGCGCAGGTACT
GATAATGGAGGGGATGGTATGGCTTGGACTGGAGATCCGGTGTGGTTAGAAGACGTGTTGCGCCCCGTATTAGGG
GACCGTCTTCGCGTCCTTCCTTCGTGGCAAATGTACGGTCACGGTGATTTCAAAGATATCCGTGGAGTTATGGTG
CATCATACTGGGAACGCGCGTGAAACAGCAGAGTCCATTCGTAAGGGCCGTCCAGATTTGCGTGGCCCGTTGTCG
AACATCCACATCGCGCCCGATGGAACCGTTACACTTGTTGCCGCAGGTGTTTGCTGGCACGCCGGTGCCGGGTCA
TACCCGTGGTTACCTACCAATAATGCCAATTGGCATATGATCGGAATTGAATGCGCATGGCCTACTATTCGTCCG
AACGGGACATACGACGAGCGCGAGCCTTGGCCCGATGCGCAAATTATCGCTATGCGCGATACGTGTGCCGCCTTA
ACCAAACGTCTGGGCTGGGACGCCTCGCGCGTTATTGGCCACAAGGAATATGCCGGGGCTTCTCAGGGAAAATGG
GATCCAGGGAATTTGGATATGGGTTGGTTCCGTGGTGAGGTTGCTAAAGCGATGCGCGGCGAGTTCGATCCAAAG
GCGCCAGCACCAGCACCCAACCCACCGGCAGACAATGACAATGGGGGCTTCCTTATGGCGCTTAACGATAAGCAA
CAACATGATTTATACAATGCGGTTATGACTATCGCAGCAGTCGCTGCCGACATCCAAACACAATTACGCGGTCCC
GGCCTTCGTGGTTGGCCCCAATTGGGCCGCAATGCGAACGGTGAGGCATTAACCCTGGTGGATGCTGTGGGAGTC
ATCAAGGCCATTGCGGATCGCGAGGCCGGGCGTTGA
Length: 485
Molecular weight: 52.71 kDa
Type: protein
Feature: contains the following domains:
Lysozyme like domain superfamily; 20→190
N-acetylmuramoyl-L-alanine amidase (Am_2); 233→380
Peptidoglycan binding domain; 225→396
Other information: LysA-DS6A
Sequence ID No: 8
MLTVESFAAAMGNSLSVDRYRQLFPAAVESMVACGCTTVNRAAMWLAQVGHESGGLRWMEELASGAAYEWRSDLG
NTQAGDGVRFKGRGPIQITGRYNYRKVSEWAHAQGIVPTPTYFVDNPTQLASDQYGFIGVSWYWQHGGPRPGQIN
GFADAGDILSGSRCVNGWVTTPNGMPDRTERWNRCRAMGDQILPAGAGTDNGGDGMAWTGDPVWLEDVLRPVLGD
RLRVLPSWQMYGHGDFKDIRGVMVHHTGNARETAESIRKGRPDLRGPLSNIHIAPDGTVTLVAAGVCWHAGAGSY
PWLPTNNANWHMIGIECAWPTIRPNGTYDEREPWPDAQIIAMRDTCAALTKRLGWDASRVIGHKEYAGASQGKWD
PGNLDMGWFRGEVAKAMRGEFDPKAPAPAPNPPADNDNGGFLMALNDKQQHDLYNAVMTIAAVAADIQTQLRGPG
LRGWPQLGRNANGEALTLVDAVGVIKAIADREAGR
Length: 1209
Type: DNA
Other information: LysA-Giles
Sequence ID No: 9
ATGCCTGTCTATGCGATTCAGTCTGGAACTGTTATTTACGCCGGTGCCGCATCGGGATATGGTGGTCCTGACCCT
GCAGGCTGGCTTGTTATTGATTCTGATGATGCCGAGGGTGGCGGCTGTTTAGAGTATGGTCATATTGTCCGTGAG
GTAAATCGTGGTGATCATGTGACGGCGGGTCAACGTATTGGACATATTAATCCAAATAATCGTACGAATGGTGGA
GTGGCCCCGCATCTTCATGTAACTGACTGGCCACATGCGTATGGGCAAGGCAGCCGTCAAAATGTGATGGCACGC
TTGAGTGGAGCCCGCGAGCCAGAAGCCCAAGCGGCCCCAACCCCCACAGAGCAAGGCACTGTTGTTGGTGACCCG
GTTTGGTTGGCGGATGTAGTGCGCCCAACTGTAGCTAAATTTGCGGAGTATCCTGGCTGGCGTAATCGTGGTCAC
GGTGATTTTAAGGATATCCGTGGAGTTATGGTTCATCATACAGGTGGGCCCGCCTCTGCAGCCTCAATTGCGAAT
GGCCGCCCAGACCTTGCCGGCCCTCTTGCACAGCTGCATATTTCGCGTGATGGGACAGTTACTGTCGTAGCTGTA
GGAGTGGCTTGGCATGCGGGTGCAGGCAGCTATCCATGGTTACCGACCAACATGGGTAATTGGCACTTGATTGGT
ATTGAATGTGAGTGGCCATATGGTGAGCCGGGAATTAATGAGCGTAATGCCTATACAGTACGCTGGCGTGATCCA
GAGATTATTGCGCTGCGTAATACATGTGCGGCAATTTTACTGCGCCTTGGCCTCGGGGTAGATCGCCTGATTGGC
CATAAGGATTATGCCGGCCGTGCTCAAGGCAAGTGGGACCCGGGAAATATGAGCATGGACTGGCTGCGTGGCGAG
GTGCGTAAAGATATGGATGGCTTTGTATTTCCCGGTGAGGATATTGTAAATGTGACCCCGCCACCAGTCCCGGCC
CCTGTCCCTGCCCCGCCAGCGACTGCGAATGTTCTTCTCCATCGTGGTATGAGTGGACCTAATGTTGTCAAATTA
CAGACAACTCTCCGTCGTTGGTATTCAAAACTGGCGGTAGACGGTGATTTTGGCCCCCATACAGAGGCATGTGTA
CGCGATCGCCAACGCATTTATGGGTTGGACGTGGATGGTATTGTCGGACCATTAACTGCGGCCAAAATCGGCCTG
GTTTTGTGA
Length: 402
Molecular weight: 43 kDa
Type: protein
Feature: contains the following domains:
Peptidase family M23; 2→93
Amidase_2; N-acetyl-β-D-muramidase; 123→298
Cell wall binding domain; 320→350
Peptidoglycan binding domain; 351→398
Other information: LysA-Giles
Sequence ID No: 10
MPVYAIQSGTVIYAGAASGYGGPDPAGWLVIDSDDAEGGGCLEYGHIVREVNRGDHVTAGQRIGHINPNNRTNGG
VAPHLHVTDWPHAYGQGSRQNVMARLSGAREPEAQAAPTPTEQGTVVGDPVWLADVVRPTVAKFAEYPGWRNRGH
GDFKDIRGVMVHHTGGPASAASIANGRPDLAGPLAQLHISRDGTVTVVAVGVAWHAGAGSYPWLPTNMGNWHLIG
IECEWPYGEPGINERNAYTVRWRDPEIIALRNTCAAILLRLGLGVDRLIGHKDYAGRAQGKWDPGNMSMDWLRGE
VRKDMDGFVFPGEDIVNVTPPPVPAPVPAPPATANVLLHRGMSGPNVVKLQTTLRRWYSKLAVDGDFGPHTEACV
RDRQRIYGLDVDGIVGPLTAAKIGLVL
Length: 1155
Type: DNA
Other information: LysA-Ms6
Sequence ID No: 11
ATGACTACAAAGGACCAGGTAGCGCAGATTACAATTGCAGAGGCAAAAGCCCGTGGGTATACTCGTTCAGAGTGT
TTAGCCATTATGTCTACGTTTTATCAGGAAAGCGGTTGGAATGATACTATTTGGGATCCTACGCATACAACGTAT
GGAATCGCGCAACAAGATGGTAGTTATCCCCATCGTTTTGATGGCGCGGCCGCGCAGATTAAGGGTTTCTTTGAT
AAACTGGATGTTTGGCGTGCAAAGCCGGGCGCATCGACAGACATTTGGCTTAATATTTGTTGGATGCAACAAGCG
CCGAATTGGCCGTCGGCCGATTATTGGTATGCGAATGGTCGTCGTGCTTATCTGACAGAGATTAAAAGTCGTATT
GCGACGGTTACGCCGTATCTGGATAAATATTGGCCTGCTGACGGCGGCACGGCGGTTCCAGATGAGCCTCGTCCG
GACTTTAATGAGTTCCCAATTTGGTCAAATAATAATTCGGCGCGTTCAGGTAAACCGACTATGTTTCTGATTCAT
ACGCAGGAAGGCGGTGGTGGTGATGCCGCAGCTGAAAATTTGGCCAAATGGTTTCAAAATGGTAATGGAGTGTCC
TATCATTATACCATTAGCCAGGCAAGCGACGGCGGCGTAACCGTAGTGGACTGTGTAGATACGGATCGTGCGGCG
TGGAGCGTCGGAAATGCTAATAGTATTAGTATTAATTTGTGTTTTGCTGGATCACGCGCGAGCTGGATGCGCGAC
CAATGGATGAAACAATCGAATGCTATTGATGTTGCCGCGTATCTGGCTGTTCAAGATGCCAAGAAATATGGTTTT
ACGCCCTTGGTCGTACCGCCGCCGTACACCAACGGCCGTCCGGGGATTAGCGATCATCGCTGGGTTACTGATGTA
TTTAAATGGGGTACCCATACGGATGTTGGTGATTGGTTTCCTTGGGATTATTTTGCGGAGCGCGTTAATCATTGG
GCAAATGGCGGTAAAACGGAACCGGAGCCACCTAAAGTTAAGCGTTTTCCTGATGATTGGAGCGATCGTGAGATT
CTGGTTGAAATTCTTCGCCAGTTACGTGGGTATAATTTGACCGGGTGGCCACAATTGGGTGGCAAGACACTGGTA
GATGCTGTGGCGGAGTTGCTGGGACATTGA
Length: 384
Molecular weight: 43 kDa
Type: protein
Feature: contains the following domains:
Hydrolase; 5→154
Amidase_2; N-acetyl-β-D-muramidase; 175→299
Cell wall binding domain; 313→376
Other information: LysA-Ms6
Sequence ID No: 12
MTTKDQVAQITIAEAKARGYTRSECLAIMSTFYQESGWNDTIWDPTHTTYGIAQQDGSYPHRFDGAAAQIKGFFD
KLDVWRAKPGASTDIWLNICWMQQAPNWPSADYWYANGRRAYLTEIKSRIATVTPYLDKYWPADGGTAVPDEPRP
DENEFPIWSNNNSARSGKPTMFLIHTQEGGGGDAAAENLAKWFQNGNGVSYHYTISQASDGGVTVVDCVDTDRAA
WSVGNANSISINLCFAGSRASWMRDQWMKQSNAIDVAAYLAVQDAKKYGFTPLVVPPPYTNGRPGISDHRWVTDV
FKWGTHTDVGDWFPWDYFAERVNHWANGGKTEPEPPKVKRFPDDWSDREILVEILRQLRGYNLTGWPQLGGKTLV
DAVAELLGH
Length: 1644
Type: DNA
Other information: LysA-TM4
Sequence ID No: 13
ATGTCATTTACGCGCTTTCTCCAAGACGATCCCTTGCTGACTCGTGAACAGGTAATGGCAGAACTCATCCGCGTT
GCTGATGAATTGAATATGCCTGATAAACGTGGAGCATGTGTGATCGCAGGAATGACTATCTCACAGGAAGTTGGT
GTGAAAGATAATGATCCCCCATTTGAACGCCGTTTCTGGTGTCCAGCAAATCGTGCGGATCCAGAGTCTTTTAAT
TATCCACATGATAGTGAGTCCAATGATGGACGTTCAGTGGGGTATTTTCAACAACAAAAGGGCCCAAATGGTGAA
CTTTGGTGGGGCACTACCGCGAGTGAAATGAATTTACATAGTGCAGCCACCCAATTCATGACTCGTTTAAAAGCC
GCGGGTTATAATGCCTCTAATGCGCAAGCCGCAAATGATTCTGCTCAAGCTATTCAACGTTCAGGTGTTCCACAA
GCCTATAAACAGTGGTGGGATGATATCAATCGTTTATATGATAAAGTAAAAGGTAGCGGCGGCGGACCCGCACCG
GCTCCCAAACCACCTCAAAGCGGTCCTTGGACTGGTGATCCTGTTTGGTTAGCAGATGTATTACGTGCAGAAGGC
TTGAATGTTGTTGAACTCCCTGGTTGGTTAGATCGTGGTCATGGAGATATGGGTCGTCTGTGGGGCGTCGTATGT
CACCATACTGGTAGTGACAATACTCCAAGCTCTGAAATCGCATTCCATCCCAGCCTGGGTCTTTGTTCCCAAATC
CATCTTGCCCGTAATGGTACGGTTACACTTTGTGGCGTTGGTATTGCGTGGCACGCAGGAGTGGGATCGTACCCG
GGGTTGCCGGAAGATAATGCAAATGCCGTGACAATTGGTATTGAAGCACAAAATTCGGGTACATACGATGGTGCT
CCTCATCGCACCAACTGGCCGGATGCACAGTATGATGCGTACGTCAAATGTTGTGCGGCTATTTGTCGTCGTCTG
GGAGTCCGTGCAGACCATGTAATTTCGCATAAAGAGTGGGCGGGCCGTAAACAGGGTAAGTGGGACCCGGGAGCG
ATTGATATGAATATTTTCCGTGCGGATGTTCAACGTCGTATTGATGCGCACCAGCCGAATGGTGAAGATGACTTT
ATGGCGGCTCTGAGCGCGGATGAACAACGTGAAGTTTTGAATCTTTTGCGTGTTTTAGCGGATCGCCGCTTTGTG
AGTCGTTCACCTTTTCGTCATCTCGGTGAAGGTCCATCCGAGACGGTAGCGGGCTTTGGTTTAAATACGGATGGA
CTGAACCATGCTCAATATACCATCGAACTCGCACGTCTCGGGGATCCTACCCATTTAGCGTTACTCCGTGAAGTA
GCTAGTGCGGAAGGGGATTCTCGTTACCCGGATCGCCAATATGATGCGAAATTGGCGAAACGTGTCTTGGCTGAG
ATTGAAGGTGCGGCGACCGCGCCTGCGAAACCTTCTACTCCTTCAGCGCCAACGGAACCAGCACCGGAAGCACCT
ACTCCACCGGTGAAAGCGGCTTGTGCACTCAGCGCCGCGGGCTGTGTAGTAGCGGGGAGCACTTCAGGTGGTGGT
TGTGCGTTATCGACAGATGGTACGGGGAAATGTGTGGTCACTGCGGCCACTGATGGTGGCGCGGCATGA
Length: 547
Molecular weight: 58.58 kDa
Feature: contains the following domains:
M23B Peptidase; 67→165
Amidase_2; N-acetyl-β-D-muramidase; 187→357
Cell wall binding domain; 401→484
Other information: LysA-TM4
Sequence ID No: 14
MSFTRFLQDDPLLTREQVMAELIRVADELNMPDKRGACVIAGMTISQEVGVKDNDPPFERRFWCPANRADPESEN
YPHDSESNDGRSVGYFQQQKGPNGELWWGTTASEMNLHSAATQFMTRLKAAGYNASNAQAANDSAQAIQRSGVPQ
AYKQWWDDINRLYDKVKGSGGGPAPAPKPPQSGPWTGDPVWLADVLRAEGLNVVELPGWLDRGHGDMGRLWGVVC
HHTGSDNTPSSEIAFHPSLGLCSQIHLARNGTVTLCGVGIAWHAGVGSYPGLPEDNANAVTIGIEAQNSGTYDGA
PHRTNWPDAQYDAYVKCCAAICRRLGVRADHVISHKEWAGRKQGKWDPGAIDMNIFRADVQRRIDAHQPNGEDDF
MAALSADEQREVLNLLRVLADRRFVSRSPFRHLGEGPSETVAGFGLNTDGLNHAQYTIELARLGDPTHLALLREV
ASAEGDSRYPDRQYDAKLAKRVLAEIEGAATAPAKPSTPSAPTEPAPEAPTPPVKAACALSAAGCVVAGSTSGGG
CALSTDGTGKCVVTAATDGGAA
Length: 460
Type: DNA
Sequence ID: EADA1 (SEQ ID NO: 313)
TATTGTACCACAAGAAACGGGTTGGTGGTGCGGTCCGGCAGCGACGCAAGTTGTTCTGAATAGTCGTGGAATTAT
TGTACCGGAAGCGACCCTGGCAAATGAAATTGAACAAATTGAAAATCCAGGTCGCGGTGACGATCGTGATGGAAC
GGATTATGTGGGGCTTATTGAACAAGTGCTTGATCGCCGTGTGCCCGAAGCGAAATATACGAGCGTGTATATGCC
TAATGATCCGCCCACCGCAGCCCAACGCGAAGCTTTATGGCAAAATATTGTGCGCTCCATTAATGCGGGCTGGGG
TGTCATTATGAATTGGGTGGCGCCGCCATCCAATAAACCACGCGGAGTCAAAGGTAGCCCCAATCCTAAATATTC
AGGTGGTACAACTTATCATTATGTGGCCTGTATGGGTTATGATGATACTCCGGGCGCCCGCGCCTTGTGGATTGC
GGATTCTGGG
Length: 153
Molecular weight: 16.7 kDa
Type: protein
Feature: Peptidase_C39_2
Sequence ID No: EADA1 (SEQ ID NO: 326)
IVPQETGWWCGPAATQVVLNSRGIIVPEATLANEIEQIENPGRGDDRDGTDYVGLIEQVLDRRVPEAKYTSVYMP
NDPPTAAQREALWQNIVRSINAGWGVIMNWVAPPSNKPRGVKGSPNPKYSGGTTYHYVACMGYDDTPGARALWIA
DSG
Length: 537
Type: DNA
Sequence ID: EADA2 (SEQ ID NO: 314)
GAAATCTTACCCACCTTTCGTGATGGTTTGCGCTTAGCTGAATGTAATAATGTTCCGCGCATTGCAATGTTTATT
GCACAAACAGGCCACGAAAGCGATAATTTTAATGCCACTCAAGAATATGATCATGGCCGTAATTATGGCGATCCA
AATGAAGCAACCGATCGTTGGAAATATAAAGGGCGTACGTGGATCCAAATTACATGGCGTGGTAATTATGAGCGT
TTCTCACGTTGGTGTTTTGATCGTAAATTGGTGCCTACCCCAACATATTTTGTAGATAATCCACGCGCACTCGCG
GATGTTCGTTGGGCAGGAATTGGCGCGGCGTGGTATTGGACGGTAGAACGTCCTTCCATTAATCGCCTGTGTGAT
GAGCGTAATTTAACGGAAGTTACTCGTCTGATTAATGGTGGCACATCGTGGGAAGCCCCAACCTGGATGAAACAT
CGTAAAGAACGTTATGATCGTGCGTTAGCTGTGGGTAATGATCTTTTAAAGCTGTTAGATGGCGAAGAAGAAGGG
TTTCTGTCGGCG
Length: 178
Molecular weight: 21 kDa
Type: protein
Feature: Lysozyme like domain
Sequence ID No: EADA2 (SEQ ID NO: 327)
EILPTFRDGLRLAECNNVPRIAMFIAQTGHESDNFNATQEYDHGRNYGDPNEATDRWKYKGRTWIQITWRGNYER
FSRWCFDRKLVPTPTYFVDNPRALADVRWAGIGAAWYWTVERPSINRLCDERNLTEVTRLINGGTSWEAPTWMKH
RKERYDRALAVGNDLLKLLDGEEEGELSA
Length: 189
Type: DNA
Sequence ID: EADA3 (SEQ ID NO: 315)
AGCTCGAATCATTTGTCTGGAACTGCAATGGATCTTAATTGGAATACACATCCTTTTCAAGTTCCCGATGCGGGT
TTTGATGCTGCCAAGAAGGCTCGTGTAAAGGAACTGTTGGATTTCTATGAAGGAATGGTCTTTTGGGGTAATGAT
TGGAGCTCACCGAAAGACGCAATGCATTTTCAACTGGCT
Length: 63
Molecular weight: 7.12 kDa
Type: protein
Feature: Peptidase_M15_4
Sequence ID No: EADA3 (SEQ ID NO: 328)
SSNHLSGTAMDLNWNTHPFQVPDAGFDAAKKARVKELLDFYEGMVFWGNDWSSPKDAMHFQLA
Length: 423
Type: DNA
Sequence ID: EADA4 (SEQ ID NO: 316)
AGCGGTCTGCGTGAGAGTGAATGTACTAATGTGAATCGTATTGCCATGTGGTTGGCGCAAATTGGCCACGAGAGC
GGAAGTTTTCAATATACAGAAGAAATTGCGAAGAATGGTCGCTATGCACCATATATTGGTCGCACCTGGATCCAA
ATTACTTGGGATTATAATTATCGTTCTTTTAGCCAATGGGCCTATGCCTTTGGTATGGTCCCTACACCAGATTAT
TTTGTTGTAAATTATCGTGAACTGGCGGACTTAAAATGGGCCGGAATTGGTCCGGCGTGGTATTGGACTGTTGCG
CGTCCCGATATTAATGAATTAAGTGATCGTCGTGATTTGAATACCGTAACTCGTCGCATTAATGGTGGTACGAAT
GGTCTGGCTGACCGCCAGGCGCGTTATAATCGTGCATTGGCTCAAGGT
Length: 141
Molecular weight: 16.3 kDa
Type: protein
Feature: Lysozyme like domain
Sequence ID No: EADA4 (SEQ ID NO: 329)
SGLRESECTNVNRIAMWLAQIGHESGSFQYTEEIAKNGRYAPYIGRTWIQITWDYNYRSFSQWAYAFGMVPTPDY
FVVNYRELADLKWAGIGPAWYWTVARPDINELSDRRDLNTVTRRINGGTNGLADRQARYNRALAQG
Length: 507
Type: DNA
Sequence ID: EADA5 (SEQ ID NO: 317)
GCCGCGCCAATTTTGGCAGCAGCGACGGGTCTTTCGGAAGCGCGTGCCGCAGAAATTTTACCAGCAGTGCGTAGC
GGTCTGCGTGAGAGTGAATGTACTAATGTGAATCGTATTGCCATGTGGTTGGCGCAAATTGGCCACGAGAGCGGA
AGTTTTCAATATACAGAAGAAATTGCGAAGAATGGTCGCTATGCACCATATATTGGTCGCACCTGGATCCAAATT
ACTTGGGATTATAATTATCGTTCTTTTAGCCAATGGGCCTATGCCTTTGGTATGGTCCCTACACCAGATTATTTT
GTTGTAAATTATCGTGAACTGGCGGACTTAAAATGGGCCGGAATTGGTCCGGCGTGGTATTGGACTGTTGCGCGT
CCCGATATTAATGAATTAAGTGATCGTCGTGATTTGAATACCGTAACTCGTCGCATTAATGGTGGTACGAATGGT
CTGGCTGACCGCCAGGCGCGTTATAATCGTGCATTGGCTCAAGGTGACGCCCTCTTG
Length: 168
Molecular weight: 19 kDa
Type: protein
Feature: Chitinase, GH19 family
Sequence ID No: EADA5 (SEQ ID NO: 330)
AAPILAAATGLSEARAAEILPAVRSGLRESECTNVNRIAMWLAQIGHESGSFQYTEEIAKNGRYAPYIGRTWIQI
TWDYNYRSFSQWAYAFGMVPTPDYFVVNYRELADLKWAGIGPAWYWTVARPDINELSDRRDLNTVTRRINGGTNG
LADRQARYNRALAQGDAL
Length: 525
Type: DNA
Sequence ID: EADA6 (SEQ ID NO: 318)
ACCTTGATTGTAACGCGCGACCATGCGCAATGGGTACACGACATGTGTCGTGCCCGTGCGGGTAATCGTTATGGG
TATGGTGGTGCCTTTACCCTGAATCCGCGTGATACGACGGATTGTTCAGGATTAGTGTTACAAACCGCCGCGTGG
TATGGTGGCCGTAAAGATTGGATTGGCAATCGCTATGGATCAACCGAATCCTTTCGCTTAGATCATAAAATTGTT
TATGATTTAGGATTTCGCCGTCTGCCACCCGGCGGTGTCGCAGCGCTCGGCTTTACGCCTGTGATGCTGGTGGGA
TTACAACATGGTGGTGGTGGTCGCTATAGCCATACTGCGTGTACCCTCATGACCATGGATATTCCGGGCGGTCCA
GTAAAAGTATCACAGCGTGGTGTTGATTGGGAAAGCCGTGGTGAGGTGAATGGGGTTGGCGTATTCTTATATGAT
GGTGCCCGTGCGTGGAATGATCCTCTGTTTCATGATTTCTGGTATTTGGATGCCAAATTGGAAGATGGTCCTACC
Length: 175
Molecular weight: 19.32 kDa
Type: protein
Feature: Cysteine protease
Sequence ID No: EADA6 (SEQ ID NO: 331)
TLIVTRDHAQWVHDMCRARAGNRYGYGGAFTLNPRDTTDCSGLVLQTAAWYGGRKDWIGNRYGSTESFRLDHKIV
YDLGFRRLPPGGVAALGFTPVMLVGLQHGGGGRYSHTACTLMTMDIPGGPVKVSQRGVDWESRGEVNGVGVFLYD
GARAWNDPLFHDFWYLDAKLEDGPT
Length: 555
Type: DNA
Sequence ID: EADA7 (SEQ ID NO: 319)
CAATCCGTGGATGCAGCAGAGATTCTGGCGCGTGCCACCGGACTGGCATATAATCGCGCTGTCGCCTTACTTCCT
GCGGTCCGCGACGGGTTAATTCAAGCAGATTGTACGAATCCTAACCGTATTGCCATGTGGCTGGCTCAAATTGGA
CACGAATCTGATGACTTTAAAGCAACAGCAGAATATGCGAGTGGCGACGCATATGATACTCGTACAGATTTGGGG
AATACTCCCGAAGTTGATGGTGATGGACGCCTGTATAAAGGACGCAGTTGGATTATGATTACTGGGAAAGATAAT
TATCGCGATTTTAGTCGCTGGGCGCATGGGCGCGGGCTTGTACCGACACCTGATTATTTTGTCGTGCATCCTTTG
GAACTTAGCGAATTACGTTGGGCCGGAATTGGCGCAGCTTGGTATTGGACTGTGGAACGTCCGGATATTAATGCG
TTATCGGATCGTCGTGATCTGGAGACTGTGACTCGTCGTATTAATGGCGGTCTGACGAATCTGGACGATCGTCGC
CGTCGCTATAATTTAGCGCTGGCAGTTGGG
Length: 185
Molecular weight: 20.7 kDa
Type: protein
Feature: Glyco_hydro_19
Sequence ID No: EADA7 (SEQ ID NO: 332)
QSVDAAEILARATGLAYNRAVALLPAVRDGLIQADCTNPNRIAMWLAQIGHESDDFKATAEYASGDAYDTRTDLG
NTPEVDGDGRLYKGRSWIMITGKDNYRDFSRWAHGRGLVPTPDYFVVHPLELSELRWAGIGAAWYWTVERPDINA
LSDRRDLETVTRRINGGLTNLDDRRRRYNLALAVG
Length: 582
Type: DNA
Sequence ID: EADA8 (SEQ ID NO: 320)
TTAACTGTAGAGAGCTTCGCTGCTGCTATGGGTAACAGCTTGTCAGTTGACCGTTACCGCCAACTGTTTCCAGCG
GCGGTTGAGTCAATGGTGGCTTGTGGATGCACCACCGTGAATCGCGCGGCGATGTGGCTGGCACAGGTCGGCCAT
GAGTCTGGGGGTTTGCGCTGGATGGAGGAGTTAGCGTCAGGAGCCGCATATGAGTGGCGCTCGGACCTTGGAAAC
ACGCAGGCGGGAGACGGCGTACGCTTTAAAGGCCGCGGACCCATCCAAATCACGGGGCGTTATAATTATCGTAAA
GTGAGTGAGTGGGCTCATGCGCAGGGCATTGTGCCTACGCCGACATACTTCGTGGATAACCCAACTCAATTGGCA
TCGGATCAATACGGCTTCATCGGTGTTTCATGGTACTGGCAGCACGGCGGGCCACGTCCAGGCCAAATTAACGGC
TTCGCAGACGCAGGGGACATCCTGTCGGGATCGCGCTGCGTGAACGGATGGGTGACAACGCCAAACGGGATGCCC
GACCGTACTGAACGTTGGAATCGTTGTCGCGCTATGGGAGATCAAATCCTTCCGGCA
Length: 194
Molecular weight: 21.51 kDa
Type: protein
Feature: Glyco hydro 19
Sequence ID No: EADA8 (SEQ ID NO: 333)
LTVESFAAAMGNSLSVDRYRQLFPAAVESMVACGCTTVNRAAMWLAQVGHESGGLRWMEELASGAAYEWRSDLGN
TQAGDGVRFKGRGPIQITGRYNYRKVSEWAHAQGIVPTPTYFVDNPTQLASDQYGFIGVSWYWQHGGPRPGQING
FADAGDILSGSRCVNGWVTTPNGMPDRTERWNRCRAMGDQILPA
Length: 525
Type: DNA
Sequence ID: EADA9 (SEQ ID NO: 321)
GATCGTCTTCGTGTGCTTCCCTCCTGGCAGATGTACGGTCATGGCGATTTTAAAGATATCCGCGGCGTTATGGTC
CACCATACTGGTAACGCTCGCGAAACTGCCGAGTCTATCCGTAAAGGACGCCCTGATTTACGTGGTCCGCTGTCC
AATATTCACATCGCACCGGATGGCACGGTGACATTAGTCGCCGCCGGAGTCTGTTGGCATGCAGGAGCCGGGTCG
TACCCATGGTTACCAACTAATAACGCCAACTGGCACATGATCGGTATTGAATGCGCTTGGCCTACAATCCGTCCA
AACGGAACGTATGATGAACGCGAGCCATGGCCTGATGCTCAAATCATCGCTATGCGTGACACCTGCGCTGCACTT
ACCAAACGTCTGGGATGGGACGCATCTCGCGTGATCGGTCATAAAGAGTACGCTGGCGCTTCGCAAGGTAAATGG
GACCCCGGCAACTTGGATATGGGATGGTTTCGTGGAGAGGTAGCTAAGGCAATGCGTGGTGAATTTGACCCTAAA
Length: 175
Molecular weight: 19.5 kDa
Type: protein
Feature: Amid2B
Sequence ID No: EADA9 (SEQ ID NO: 334)
DRLRVLPSWQMYGHGDFKDIRGVMVHHTGNARETAESIRKGRPDLRGPLSNIHIAPDGTVTLVAAGVCWHAGAGS
YPWLPTNNANWHMIGIECAWPTIRPNGTYDEREPWPDAQIIAMRDTCAALTKRLGWDASRVIGHKEYAGASQGKW
DPGNLDMGWFRGEVAKAMRGEFDPK
Length: 279
Type: DNA
Sequence ID: EADA10 (SEQ ID NO: 322)
CCTGTCTATGCGATTCAGTCTGGAACTGTTATTTACGCCGGTGCCGCATCGGGATATGGTGGTCCTGACCCTGCA
GGCTGGCTTGTTATTGATTCTGATGATGCCGAGGGTGGCGGCTGTTTAGAGTATGGTCATATTGTCCGTGAGGTA
AATCGTGGTGATCATGTGACGGCGGGTCAACGTATTGGACATATTAATCCAAATAATCGTACGAATGGTGGAGTG
GCCCCGCATCTTCATGTAACTGACTGGCCACATGCGTATGGGCAAGGCAGCCGT
Length: 93
Molecular weight: 9.72 kDa
Type: protein
Feature: Peptidase M23
Sequence ID No: EADA10 (SEQ ID NO: 335)
PVYAIQSGTVIYAGAASGYGGPDPAGWLVIDSDDAEGGGCLEYGHIVREVNRGDHVTAGQRIGHINPNNRTNGGV
APHLHVTDWPHAYGQGSR
Length: 447
Type: DNA
Sequence ID: EADA11 (SEQ ID NO: 323)
TATCCTGGCTGGCGTAATCGTGGTCACGGTGATTTTAAGGATATCCGTGGAGTTATGGTTCATCATACAGGTGGG
CCCGCCTCTGCAGCCTCAATTGCGAATGGCCGCCCAGACCTTGCCGGCCCTCTTGCACAGCTGCATATTTCGCGT
GATGGGACAGTTACTGTCGTAGCTGTAGGAGTGGCTTGGCATGCGGGTGCAGGCAGCTATCCATGGTTACCGACC
AACATGGGTAATTGGCACTTGATTGGTATTGAATGTGAGTGGCCATATGGTGAGCCGGGAATTAATGAGCGTAAT
GCCTATACAGTACGCTGGCGTGATCCAGAGATTATTGCGCTGCGTAATACATGTGCGGCAATTTTACTGCGCCTT
GGCCTCGGGGTAGATCGCCTGATTGGCCATAAGGATTATGCCGGCCGTGCTCAAGGCAAGTGGGACCCGGGA
Length: 149
Molecular weight: 16.18 kDa
Type: protein
Feature: Amidase 2
Sequence ID No: EADA11 (SEQ ID NO: 336)
YPGWRNRGHGDFKDIRGVMVHHTGGPASAASIANGRPDLAGPLAQLHISRDGTVTVVAVGVAWHAGAGSYPWLPT
NMGNWHLIGIECEWPYGEPGINERNAYTVRWRDPEIIALRNTCAAILLRLGLGVDRLIGHKDYAGRAQGKWDPG
Length: 297
Type: DNA
Sequence ID: EADA12 (SEQ ID NO: 324)
GCAAATCGTGCGGATCCAGAGTCTTTTAATTATCCACATGATAGTGAGTCCAATGATGGACGTTCAGTGGGGTAT
TTTCAACAACAAAAGGGCCCAAATGGTGAACTTTGGTGGGGCACTACCGCGAGTGAAATGAATTTACATAGTGCA
GCCACCCAATTCATGACTCGTTTAAAAGCCGCGGGTTATAATGCCTCTAATGCGCAAGCCGCAAATGATTCTGCT
CAAGCTATTCAACGTTCAGGTGTTCCACAAGCCTATAAACAGTGGTGGGATGATATCAATCGTTTATATGAT
Length: 99
Molecular weight: 11.07 kDa
Type: protein
Feature: M23B peptidase
Sequence ID No: EADA12 (SEQ ID NO: 337)
ANRADPESFNYPHDSESNDGRSVGYFQQQKGPNGELWWGTTASEMNLHSAATQFMTRLKAAGYNASNAQAANDSA
QAIQRSGVPQAYKQWWDDINRLYD
Length: 384
Type: DNA
Sequence ID: EADA13 (SEQ ID NO: 325)
TGGGGCGTCGTATGTCACCATACTGGTAGTGACAATACTCCAAGCTCTGAAATCGCATTCCATCCCAGCCTGGGT
CTTTGTTCCCAAATCCATCTTGCCCGTAATGGTACGGTTACACTTTGTGGCGTTGGTATTGCGTGGCACGCAGGA
GTGGGATCGTACCCGGGGTTGCCGGAAGATAATGCAAATGCCGTGACAATTGGTATTGAAGCACAAAATTCGGGT
ACATACGATGGTGCTCCTCATCGCACCAACTGGCCGGATGCACAGTATGATGCGTACGTCAAATGTTGTGCGGCT
ATTTGTCGTCGTCTGGGAGTCCGTGCAGACCATGTAATTTCGCATAAAGAGTGGGCGGGCCGTAAACAGGGTAAG
TGGGACCCG
Length: 128
Molecular weight: 13.72 kDa
Type: protein
Feature: M23B peptidase
Sequence ID No: EADA13 (SEQ ID NO: 338)
WGVVCHHTGSDNTPSSEIAFHPSLGLCSQIHLARNGTVTLCGVGIAWHAGVGSYPGLPEDNANAVTIGIEAQNSG
TYDGAPHRTNWPDAQYDAYVKCCAAICRRLGVRADHVISHKEWAGRKQGKWDP

[0058] A domain (e.g. a second domain) with activity specific to an ester linkage may be specific to the ester linkage between mycolic acid and arabinogalactan. By “activity specific to an ester linkage” we include the meaning that the domain is capable of binding or associating with an ester linkage, and/or that the domain enacts a change (for example, the breakdown of the target entity) on an ester linkage. For example, the domain may be capable of cleaving ester linkages/ester bonds in the cell wall. For example, the second domain may target an ester link between any one of more of the following components: trehalose, mycolates, arabinogalactan, peptidoglycan, muramic acid; optionally wherein the components are in the following pairs: arabinogalactan and mycolates; trehalose and mycolates; arabinogalactan and peptidoglycan linkages; and/or arabinogalactan and muramic acid.

[0059] The domain with activity specific to an ester linkage may be an enzyme or a domain derived from an enzyme which retains the functional activity of the enzyme, e.g. an enzyme active domain (EAD). Thus, in one embodiment, the second domain exerts enzyme activity on an ester linkage. In one embodiment the domain is an enzyme with lipolytic activity.

[0060] In one embodiment the domain is selected from any member of the alpha/beta hydrolase family, or a domain derived from a member of the alpha/beta hydrolase family. Such a domain may be a mycolyl arabinogalactan esterase, for example a LysB and/or at least one EAD thereof. For example, such a domain may be a mycolyl-arabinogalactan-peptidoglycan (mAGP) hydrolase. Such a domain may act specifically on particular components of the aforementioned targets. For example, the domain may target the ester linkage of mycolic acids. In a further example, the domain may have one or more of the following enzyme activities: alpha/beta hydrolase, esterase, lipase, cutinase, trehalose dimycolate hydrolase (TDMH), Pectinesterase, CheB methylesterase, Glycerophosphoryl diester phosphodiesterase, Plant invertase/pectin methylesterase inhibitor, Carboxylesterase family, Calcineurin-like phosphoesterase, Putative esterase, Thioesterase domain, Hemagglutinin esterase, Calcineurin-like phosphoesterase superfamily domain, Pectinacetylesterase, Putative serine esterase, Esterase PHB depolymerase, Esterase-like activity of phytase, Chitin recognition protein, Glycosyl hydrolase all families, Amidase, Lipase all families, GDSL-like Lipase/Acylhydrolase, Partial alpha/beta-hydrolase lipase region, GDSL-like Lipase/Acylhydrolase family, Secretory lipase, Patatin-like phospholipase, Carboxylesterase, Variant-surface-glycoprotein phospholipases all families, Putative lysophospholipase, Alpha/beta-hydrolase superfamily, Hydrolase, haloacid dehalogenase-like hydrolase, epoxide hydrolase and dehalogenases, peroxidase, or combinations thereof.

[0061] In one embodiment the domain is a mycolylarabinogalactan esterase, such as LysB. Thus, in one embodiment the domain is LysB and/or at least one enzyme active domain (EAD) thereof.

[0062] The targeting of the ester linkage (also termed “ester bond”, both of which are interchangeable herein) refers to an ester link or bond between two entities. For example, the ester link may be between a mycolic acid (MA) that is bonded (i.e. via an ester bond) to the terminal pentaarabinofuranosyl units of arabinogalactan (AG). Accordingly, in some embodiments, the domain targeting (or having specificity/affinity for) an ester link may be a domain that targets and/or disrupts the binding of MA to the terminal pentaarabinofuranosyl units of AG. This may be achieved by at least one Lysin B, for example at least one LysB. LysB are made up of enzyme active domains (EAD) that may have mechanisms of actions corresponding to (i.e. specific activity resembling): alpha/beta hydrolase activity, esterase activity, lipase activity, protease activity, TDMH, cutinase activity, trehalose dimycolate hydrolase (TDMH), Pectinesterase, CheB methylesterase, Glycerophosphoryl diester phosphodiesterase, Plant invertase/pectin methylesterase inhibitor, Carboxylesterase family, Calcineurin-like phosphoesterase, Putative esterase, Thioesterase domain, Hemagglutinin esterase, Calcineurin-like phosphoesterase superfamily domain, Pectinacetylesterase, Putative serine esterase, Esterase PHB depolymerase, Esterase-like activity of phytase, Chitin recognition protein, Glycosyl hydrolase all families, Amidase, Lipase all families, GDSL-like Lipase/Acylhydrolase, Partial alpha/beta-hydrolase lipase region, GDSL-like Lipase/Acylhydrolase family, Secretory lipase, Patatin-like phospholipase, Carboxylesterase, Variant-surface-glycoprotein phospholipases all families, Putative lysophospholipase, Alpha/beta-hydrolase superfamily, Hydrolase, haloacid dehalogenase-like hydrolase, epoxide hydrolase and dehalogenases, peroxidase, or any combinations thereof. Accordingly, in one embodiment, the targeting of the ester linkage is with LysB.

[0063] Each of the above activities may arise from a single EAD that is derived from a LysB. However, each LysB may comprise different EADs. For example, a LysB may comprise EADs with at least alpha/beta hydrolase activity, esterase activity, lipase activity, protease activity, TDMH, and/or cutinase activity; or a LysB may comprise only EAD with alpha/beta hydrolase activity, esterase activity, lipase activity, protease activity, TDMH, and/or cutinase.

[0064] Alternatively, or additionally, the targeting of the ester linkage may be achieved using at least one EAD derived from a LysB. EAD derived from LysB may be fused with any other domain component contemplated herein. EAD derived from LysB may be fused to further LysB and/or EAD derived from LysB. For example, a first EAD derived from LysB with lipase activity (and/or any previously specified activity) may be fused to a second EAD derived from LysB with cutinase activity (and/or any previously specified activity). Fusions may comprise 1, 2, 3, 4, 5, 6, 7, 8, 9, 10 or more EADs derived from LysB. “Derived from LysB” is to be construed as encompassing EADs derived from the same LysB or from different LysB. For example, a first EAD (with any of the above listed activities) derived from a first LysB may be fused with a second EAD (with any of the above listed activities, whether the same or different compared with the first EAD) derived from the first and/or a second LysB.

[0065] The domain with activity specific to an ester linkage may further comprise at least one cell wall binding domain (CBD). The CBD may be specific for the target cells of interest. For example, the CBD may confer specificity of a peptide to at least one mycobacteria. Alternatively, or additionally, the CBD may be classified as one that does not have specificity for Gram-negative bacteria and/or Gram-positive bacteria. For example, the CBD of a peptide described herein may be specific for mycobacteria only and not specific for Gram-negative bacteria. Multiple CBD may be present, for example as tandem repeats, and/or as multiple copies at different positions within a peptide. The presence of multiple CBD may refer to multiple copies of the same CBD and/or different CBD. For example, a peptide may comprise multiple copies of a first CBD and only one copy of a second (or further) CBD; or comprise multiple copies of a first CBD and multiple copies of a second (and/or further) CBD. In one embodiment, the CBD of this domain may be LysB Saal.

[0066] The wildtype forms of lytic enzymes of interest for the present invention (e.g. LysA and LysB) comprise more than one catalytic domain (i.e. EAD) representing the different classes of peptidoglycan hydrolases and esterases (or in general alpha/beta hydrolases). Accordingly, LysA and/or LysB may refer to enzymes that have a single type of activity (whether comprised of one domain with this activity or multiple domains with the same activity) or with multiple types of activity (as discussed in Payne et al., 2012, PLOS One, 7 (3), e34052). Types of activity may also be referred to as mechanisms of action. Although wildtype LysA is composed of 1-3 EAD and 1-3 cell binding domains (CBD), the activity required of the first domain can be achieved with one or more of EAD and/or CBD.

[0067] The LysA (and/or EAD derived therefrom) and LysB (and/or EAD derived therefrom) may derive from the same organism or different organisms. For example, at least one LysA may be derived from the same source (e.g. the same mycobacteriophage) as the LysB (or EAD derived from either). Alternatively, at least one LysA (or EAD therefrom) may be derived from a different source (e.g. different mycobacteriophages, phages, bacteria, human, animal, and/or plant sources) as the LysB (or EAD therefrom). Where multiple LysA and/or LysB are present in a fusion peptide, some may derive from the same organism, while others derive from different organisms. For example, in a fusion peptide comprising 2 LysA and 2 LysB, a first LysA may be derived from the same organism as a first LysB, while a second LysA is derived from a different organism to a second LysB (either of which may derive from the same or different organism as the first LysA and LysB).

[0068] An EAD derived from a lysin would be considered “a portion thereof” with respect to that lysin. For example, an EAD (or multiple EAD) from a specific LysA would be considered a portion thereof said LysA. Thus, use of a LysA and/or LysB throughout is intended to also mean LysA (and/or LysB) or a portion thereof.

[0069] In one embodiment, the amino acid sequence of the domain with activity specific to an ester linkage may be selected from any one or more of the amino acid sequences of SEQ ID NOs: 16, 18, 20, 22, 24, 26, 28, 30 or 32, or may be encoded by any one or more of the nucleotide sequences of SEQ ID NOs: 15, 17, 19, 21, 23, 25, 27, 29 or 31, as follows:

Length: 756
Type: DNA
Other information: LysB-D29
Sequence ID No: 15
ATGAGCAAGCCCTGGCTGTTCACCGTTCACGGCACGGGCCAGCCCGATCCCCTCGGGCCTGGCCTGCCTGCCGAT
ACGGCACGCGACGTACTTGACATCTACCGGTGGCAGCCCATCGGCAACTACCCCGCTGCGGCCTTCCCGATGTGG
CCGTCGGTCGAGAAGGGTGTCGCCGAGCTGATCCTGCAGATCGAGCTGAAGCTGGACGCGGACCCCTACGCGGAC
TTCGCGATGGCGGGTTACTCGCAGGGAGCCATCGTGGTTGGCCAGGTGCTCAAGCACCACATCCTGCCTCCGACG
GGCAGGCTCCACAGGTTCCTGCACCGGCTCAAGAAGGTCATCTTCTGGGGTAATCCCATGCGGCAGAAGGGCTTT
GCCCACTCTGACGAGTGGATCCACCCGGTCGCTGCCCCTGACACCCTCGGAATCCTCGAGGACCGGCTCGAAAAC
CTGGAGCAGTACGGCTTCGAGGTCCGCGACTACGCCCACGACGGTGACATGTACGCCTCCATCAAAGAGGACGAC
CTGCACGAATACGAGGTCGCCATCGGCCGGATCGTGATGAAGGCCAGCGGCTTCATCGGTGGCCGGGACTCCGTG
GTAGCCCAGCTCATCGAGCTTGGCCAGCGTCCGATCACCGAGGGAATTGCGTTGGCGGGAGCCATCATCGACGCC
CTCACGTTCTTCGCCCGCTCTCGTATGGGCGACAAGTGGCCGCACCTCTACAACCGCTACCCGGCGGTCGAGTTC
CTACGACAGATCTGA
Length: 254
Molecular weight: 28.5 kDa
Type: protein
Feature: contains the following domains:
Cutinase domain; 41→69
LysinB C-terminal linker domain; 176→244
PE-PPE; 51→125
Other information: LysB-D29
Sequence ID No: 16
MSKPWLFTVHGTGQPDPLGPGLPADTARDVLDIYRWQPIGNYPAAAFPMWPSVEKGVAELILQIELKLDADPYAD
FAMAGYSQGAIVVGQVLKHHILPPTGRLHRFLHRLKKVIFWGNPMRQKGFAHSDEWIHPVAAPDTLGILEDRLEN
LEQYGFEVRDYAHDGDMYASIKEDDLHEYEVAIGRIVMKASGFIGGRDSVVAQLIELGQRPITEGIALAGAIIDA
LTFFARSRMGDKWPHLYNRYPAVEFLRQI
Length: 846
Type: DNA
Other information: LysB-Omega
Sequence ID No: 17
ATGTTGAACGGTGAATTTTACGTTCCGGCAGGGACAATCATTACTGCCAACGGGACAGGGGTTCCAGATGGTGCG
GGGCCCGGATTTGGTGCCGATCTGGCTCGCGAACTGGAGCGTGTGGCTGAAGGCATGTGGATTTGGAAATGGATC
AACTACCCAGCAGCAGTAATGCCGATGCGTCCGAGCATTAATACGTTGCGTTTGGCTTTAAAAGAGATGATCCGT
ACCACTCCGGGCAAAATTGTTTTATCGGCGTACTCTCAATCGGCCGTGGCTTTTGCTTACGTATGGCGCGACGAC
ATTCTTAACCCCGATGGTGAACTTCACGACCGCCTGGATGATATTGTAGCAGTAATCTTGTACGGCAACCCAGTT
CGCGCCCCTGGGATTGCTTATGGCAACGAGTTAGGCGGTCAATCTGCCCCCGGCAAGCTGAATGGGCATGTCACC
GGCGGCATCGCCGGGCCTGATTGTTTGCGCCCGGAAGAGTGCGTCCATCCCGTCACTGGGCGTCGCATTGTACTG
GACTTCGCTAATGCCGGTGATTIGTACGCTGCTGCACCCGTTGGCGCGGAACCCIGGGTCAAAGAGACTGAGGTA
GGCCATAACGAGACGCTTATTTACGAAGCTGTTATGGATTTTAATGGCCGCGATATCCTTGCATTCGCCAAAGAG
ATCGCACAGATTCTTACAATGCCCTTGAGCCAGGTCGTACCGCTGGTACAAGCAATTATCAACGGGTTAAGCTTT
CTTGTCCAGGGCCCGAAAGCTCCGCACTGGACGTACACGATTGGCCCGGCAGTCGATTACTTAGTCCGCACGGGC
AATGAACTTCGTAAAAATTGA
Length: 281
Molecular weight: 30.3 kDa
Type: protein
Feature: contains Cutinase domain; 21→139
Other information: LysB-Omega
Sequence ID No: 18
MLNGEFYVPAGTIITANGTGVPDGAGPGFGADLARELERVAEGMWIWKWINYPAAVMPMRPSINTLRLALKEMIR
TTPGKIVLSAYSQSAVAFAYVWRDDILNPDGELHDRLDDIVAVILYGNPVRAPGIAYGNELGGQSAPGKLNGHVT
GGIAGPDCLRPEECVHPVTGRRIVLDFANAGDLYAAAPVGAEPWVKETEVGHNETLIYEAVMDENGRDILAFAKE
IAQILTMPLSQVVPLVQAIINGLSFLVQGPKAPHWTYTIGPAVDYLVRTGNELRKN
Length: 1002
Type: DNA
Other information: LysB-Saal
Sequence ID No: 19
ATGCGCATCGACGGTCAATATGTGGGACTGGGGCTTGGGGATTCTTCAGACGAGATCCGTAAAATCAAGGCGTTC
ATGCGCCGCAAATTCGCGAGCTATGCCGGAGATTTAGCGGATACTCCTTTGTACGATGAAGCTATGACCGCAGCA
GTGGCCGAGATGCAAGCGCGCTACAGTGCGGCTGGTCAACTICGTGCTGGATTGTACATTCCCGGTATCGTAGGA
GCCGAAACTAAGTATGTGATGGGTTACTTACCCCGCCCCGTCGTTGATACTCGTCCGGTACTGATCACTGTGTGT
GGTACGGGTGTTCCATGGTGGATTGGGCCTGATGCAGATACTGCTCGCGCTGTGGAGGATAAGTACCTGTGGCAA
CCGATCGGTTATCCTGCAGCCCCTTTTCCAATGGGAAAATCCATCGCGGCGGCTATTACCGAGACTCACAACCAA
GCCAATCGCTGGCGCGAGCGCATCGAAACTCACGGCGCGGCCTTGGCTGGCTATAGCCAGGGTGCAGTGGTAGTG
TCAGAGCTTTGGATGAACCACATTGCGCCGGAGGATGGTTCCCTTCATTGGATGAAACCACACATTGAAAAAGCC
GTCACTTGGGGGAACCCAAATCGCGAGTTGGGGCACGTATGGGGGGACCACGGGGGTTCTCCTCGTGCGCCGTCT
AATACCCAAGGCGTTTCAAGTAACGGAATGCGTGATACGCCCCCATGGTGGCGTGATTATGCTCACCAGGGIGAC
CITTATGCGTGTACAGAGCCAGGGGATACTCAAGAGGTGCGTAACGCGATTTGGCAAATTGTACGCGACTTGGAT
TTATTTACAGGGCCCGACAGTTTGTTAGCCCAGGTTGTAGAGTTGGTGCAGGCCCCTCTGCCCGAAGCTATCGCT
ATCACAAAGGCGCTTTTGGATGCCGGTATGTTCTTCGCTAAACGTACAGGCCCACATGTGGACTATAACGTACAG
CCAGCGATCGATTACCTGCGCACATGA
Length: 308
Molecular weight: 33.8 kDa
Type: protein
Feature: contains the following domains:
Putative peptidoglycan binding domain; 38→58
PE-PPE; 136→224
Cutinase domain; 120→208
Other information: LysB-Saal
Sequence ID No: 20
MRRKFASYAGDLADTPLYDEAMTAAVAEMQARYSAAGQLRAGLYIPGIVGAETKYVMGYLPRPVVDTRPVLITVC
GTGVPWWIGPDADTARAVEDKYLWQPIGYPAAPFPMGKSIAAAITETHNQANRWRERIETHGAALAGYSQGAVVV
SELWMNHIAPEDGSLHWMKPHIEKAVTWGNPNRELGHVWADHGGSPRAPSNTQGVSSNGMRDTPPWWRDYAHQGD
LYACTEPGDTQEVRNAIWQIVRDLDLFTGPDSLLAQVVELVQAPLPEAIAITKALLDAGMFFAKRTGPHVDYNVQ
PAIDYLRT
Length: 1038
Type: DNA
Other information: LysB-Ds6A
Sequence ID No: 21
ATGACCTGGATTGGCTGGCAGCAAGGTATGGGGGGAGAGCCGGTAGCCGCTGCGAAGCGTGAGCTTCGTCGCAAA
TTCAGTTATGCTAAACATCTGGATGACAGCGACGTATTTGATCTGGAGTTATTGGCCGTTTTGATCGAGTACCAA
CAAAAAAAGAACGCGACTGGTTATACACCTCGCCTGCGCGAAGACGGCGTTCTTGATTGGGCCACTCAAGTTGCG
ATTGGTACGGTGCAAACTGGGCCCCCTCCTAAGGCAGGCACGTTATTTACTGTGCAAGGAACTGGCGTTGATATG
TGGACAGGACCCCCGGCGGACACGGCTCGTGCCGTGGAGGGCGACTGGGAATGGCAGCCGATTGGCAATTACCCT
GCTTCACCGTTCCCAATGTGGGCTTCCATCTGGCAGGGGATTGAAGAACTGCGCTTTCAGATTCGTCGCCATGCT
ACGGAAAAACCGGGGAAAGCCATTGCCCTGGCAGGTTTCTCACAGGGTGCCGTAGTCGTAAGTTGGGTCTACAAG
TGGGACATTGCACTGCCCGGTGGCATGCTGCACGACTTGCTGCCACAGGTGGCAGCGGGTGTAACGTGGGGTAAT
CCCATGGCAGAAAAAGGCAAGTTTCATGGTAACCGCTTCGCCGGCTGGCCTGTGCCTGCCGGAATGGGGATCAAC
CGTGACCGCTTGGAAAATACCCCCGCATTATGGCTTGACTTTGGGCACGGTCGCAATTCACCTTGGGGCCAAGAT
ATTTATTGCGACCGCCCGGATAATTTGGCTGGTCAGGACATGGAGCTTATTTGTGACCTGGTCATGGCTCAGGAC
CTGTGGCGCTTTGTGACAGACTTCGCAGTAAAAGCTGGGAACGTGATGGCGTCGCCTGAGACGGAGTTACCCGCA
ATCTTGGATGCAGTTACACAAGCTGGTATGTTTTTCATTGTTAATCGTACTGCCCCGCATCTGACTTATGACGTA
GGTCCTGCCATCGATTACCTTCGCCAAGTTGCGCGCGACCGCCGCTTGGCTTTAGCCGCGTGA
Length: 345
Molecular weight: 38.17 kDa
Type: protein
Feature: contains the following domains:
LysinB C-terminal linker domain; 260→325
PE-PPE; 132→219
Cutinase domain; 119→206
Other information: LysB-Ds6A
Sequence ID No: 22
MTWIGWQQGMAGEPVAAAKRELRRKFSYAKHLDDSDVEDLELLAVLIEYQQKKNATGYTPRLREDGVLDWATQVA
IGTVQTGPPPKAGTLFTVQGTGVDMWTGPPADTARAVEGDWEWQPIGNYPASPFPMWASIWQGIEELRFQIRRHA
TEKPGKAIALAGFSQGAVVVSWVYKWDIALPGGMLHDLLPQVAAGVTWGNPMAEKGKFHGNRFAGWPVPAGMGIN
RDRLENTPALWLDFGHGRNSPWGQDIYCDRPDNLAGQDMELICDLVMAQDLWRFVTDFAVKAGNVMASPETELPA
ILDAVTQAGMFFIVNRTAPHLTYDVGPAIDYLRQVARDRRLALAA
Length: 981
Type: DNA
Other information: LysB-Obama12
Sequence ID No: 23
ATGCTGAAGTTAGGATCAAACGGGCTGATGGTTGCGGCGTGGACGGCAGTTATGCGTATCCGTTTCGCTTCGTAT
GCTCTTGGTGTAAACGGTTTACCGATCAAGGTAGATGGCTACTTTGGTTATGATGAAGAAAAAGTGCAAAAGGAG
TATCAACGTCGTACAGGACAGTTCCCGTCTGGACAAGTATCGCGCGAGGATCTGCATCGTCTGGGTTTATTGCCA
ACTTTAATCAGCATTCACGGCACAGGTCAAGCAGACCCTTTTGGCATCGGGTACCCGGCAGACATTGCTCGCCGC
GTGCTTGATCTTTATTGGTGGCAGCCGTTAGGCAACTACCCGGCGAAAGCTGTCCCTATGAACGGATCGGTTGAC
CAGGGTGAACGTGAGGGCGTCCGTTTGATCTCTGACCCCCTTATCGTGCCAGGTCCAACAGCGTTTGTAGATTAT
TCCCAAGGTTCAGTGATTGGAGGGCGCTTACGCAACCGCATGCGCCGTAAGGAGCTGCGCGGAGAGCTTGTCGCC
GCAGCCAGTTTTGGAAATCCAATGCGTCTGCGCGGCCATTACGCAGGCAACGTAGACCCTGGCGGTGAAGGTATT
GATCCACGTCAAGAGCTGGCTGCTGAACCATTCCGCATCGAGTTAGCTGCGAAAGGCGACTTGTACACGACTTGC
CCTGGCGGTCAGTCAGGCGAAATGGAACGCGCCATTTATCATGCGGTTTTTAGCAAGTTCATCGGAGAAGATACT
CTTATCGAGCAAGTATGGGAACTTGCTAAAAATCCATTTCGTGAAGTCCCGGCCGCCGTGAAGGCTATTGTGCGC
GGCGGAATGTTCGCGATCCGTGGCACAGGTCCTCATGTTCGCTACCATATTGATCAATGCCCAGGGACGGGAATG
ACATATTACGAATACGCGGTCAAGCATTTGCGCGACACCGCAGATGCGCGTTTGCGCCGCATTGTCGCGTCTGTA
ACATGA
Length: 317
Molecular weight: 35 kDa
Type: protein
Feature: contains LysinB C-terminal linker domain; 221→383
Other information: LysB-Obama12
Sequence ID No: 24
MVAAWTAVMRIRFASYALGVNGLPIKVDGYFGYDEEKVQKEYQRRTGQFPSGQVSREDLHRLGLLPTLISIHGTG
QADPFGIGYPADIARRVLDLYWWQPLGNYPAKAVPMNGSVDQGEREGVRLISDPLIVPGPTAFVDYSQGSVIGGR
LRNRMRRKELRGELVAAASFGNPMRLRGHYAGNVDPGGEGIDPRQELAAEPFRIELAAKGDLYTTCPGGQSGEME
RAIYHAVFSKFIGEDTLIEQVWELAKNPFREVPAAVKAIVRGGMFAIRGTGPHVRYHIDQCPGTGMTYYEYAVKH
LRDTADARLRRIVASVT
Length: 759
Type: DNA
Other information: LysB-Enkosi
Sequence ID No: 25
ATGTCTAAGCCTGTGCTGTTGACTGCTAGTGGGACGGGTGCGGATATGTGGTCTGGATATCCGGCGGATCTTGCG
CGTCGCGTCGAGGACCTTTACTACTTTCAGCCAATCTACTATGGTCCAGGTGGGATTCCGGCGACGGTACCAATG
GGGGCGAGCGCACAGTCTGGCGTAGATATGGGAGTACGTCTGGTACTGGAGTGCGAGGCTCGTCCGTCGCGCGAC
GTCCCTGATGGGTATGCCTTGTGTGGCTACTCTCAAGGGGGCATGGTTGTATCCGCGTTGTTGGACGAGTTTCGC
ACGGGCCGCCTTCGCCACTTGAATGGCAAATTGATGGCGGGCAGCACCTTTGGAAACCCGTGGCGCGAGCTTGAT
TCTAACGGGGGGCGCGGCATCAGCGACCGTCGCATTGTGGGGACCCCCGACTTCTGGGTGGATGAGTTCGACCCA
GGAGACATTTATGCAAACGTGCCTAACAATGATGTCGGGGATGATATGACTGCCATTTTTAAGCTGGTACAGCTG
CGCTCACTGGCTGACCTGATCGGTATTGGATCGATTATGGATCGCGTAATGGACGTTCTTCGCGGCCCATTGAGC
GGGATGCGCTCCGTAGTTGAGGCGATTGTTCGTGGCTTATTATTTTTCGGCCGTAAGCCGCCAACAGCGCCCCAT
ACAGAGTACCATTTGCGCGAGGTCCGTCCGGGAGTGACGTATTTTGAACATGCAGTCGCCCACATGCGCGCTATG
GCCGCCTGA
Length: 237
Molecular weight: 26 kDa
Type: protein
Feature: contains the following domains :
LysinB C-terminal linker domain; 147→218
Alpha/Beta hydrolase family 1→224
Other information: LysB-Enkosi
Sequence ID No: 26
MWSGYPADLARRVEDLYYFQPIYYGPGGIPATVPMGASAQSGVDMGVRLVLECEARPSRDVPDGYALCGYSQGGM
VVSALLDEFRTGRLRHLNGKLMAGSTEGNPWRELDSNGGRGISDRRIVGTPDFWVDEFDPGDIYANVPNNDVGDD
MTAIFKLVQIRSLADLIGIGSIMDRVMDVLRGPLSGMRSVVEAIVRGLLFFGRKPPTAPHTEYHLREVRPGVTYF
EHAVAHMRAMAA
Length: 966
Type: DNA
Other information: LysB-Bxz2
Sequence ID No: 27
ATGCCGTTACGCGTGGGCAGCAATGATGCAAATACCGGTGGTCTTGTATCACGCTGGCAAAAGACCATGTTAGCG
CGTTATGCCGCGTATGCGAAAGCTTATGATGGCGGCCCATTACGTGTGGATGGGTACTTTGGTTATGATGATGCC
GATGTGCAACGTGAATATGAGCGTCGTACACATCAAGTTGTGGATGGGGAAGTTAGCGATGCGGATCTGCGTGCC
TTGGGGTTGGAAGCCGCAAAACGTTGGCTTTTCACCGTGCATGGAACTGGCCAAGCAGATCCTCTTGGGCCAGGC
TTGCCTGCAGATACCGCCCGTGCCGTCCTGGATAAATATACGTGGCAACCGATTGGAAATTATCCTGCACGTGCA
TTTCCAATGTGGTCGTCCATTATGGATGGCGCGCGCGAACTCCGTTCGCAAATTGCTTCCAAAAGTGGCGAAGTT
AATCTCGCAGGTTATAGTCAGGGTGCAGTAGTGGTTGGGCAAGTTCTGAAACATGATATTATGGATCCTAAAGGT
TCTCTCCATCATCGCTTAGGTGACGTGCGTAAAGTTGTACTTTGGGGTAACCCGATGCGTCAACGTGGCATTGCC
CATTTTGACGAATGGATCCATCCTGTCGCTGGACCCGATTCTTATGGTATTTTGGACGATCGCCTGGAAGGATTG
GAGAAAGCGCCTTTTGAAATTCGTGATTATGCCCATGCCGGCGATATGTATGCGAGCATTACCGATGGTGATAAA
GATGAATATAAAATTGCCATTTGTAAAATTGTGATGACCGCTACCGATTTCTATCGCGGTCCAAATAGCGTGGTC
AGCCAGCTCATTGAATTGGGTCAACGCCCTCTGACTGAAGGTATTGCGATGGCGCTTGCAATTATTGATACCCTT
CGCTTCTTTACCAATACGGCTCATGGGTATAATATTGGTCCGGCGATTGATTTTCTTCGCTCATGA
Length: 321
Molecular weight: 35.41 kDa
Type: protein
Feature: contains the following domains:
PE-PPE; 130→199
Cutinase 149→200
LysinB C-terminal linker domain; 221→283
Other information: LysB-Bxz2
Sequence ID No: 28
MPLRVGSNDANTGGLVSRWQKTMLARYAAYAKAYDGGPLRVDGYFGYDDADVQREYERRTHQVVDGEVSDADLRA
LGLEAAKRWLFTVHGTGQADPLGPGLPADTARAVLDKYTWQPIGNYPARAFPMWSSIMDGARELRSQIASKSGEV
NLAGYSQGAVVVGQVLKHDIMDPKGSLHHRLGDVRKVVLWGNPMRQRGIAHFDEWIHPVAGPDSYGILDDRLEGL
EKAPFEIRDYAHAGDMYASITDGDKDEYKIAICKIVMTATDFYRGPNSVVSQLIELGQRPLTEGIAMALAIIDTL
RFFTNTAHGYNIGPAIDFLRS
Length: 765
Type: DNA
Other information: LysB-L5
Sequence ID No: 29
ATGAGTAAACCGTGGTTATTTACTGTGCATGGAACCGGACAACCCGATCCTCTTGGTCCCGGGCTCCCGGCAGAC
ACAGCTCGTGATGTTTTGGATATTTATCGTTGGCAACCAATTGGTAATTATCCAGCCGCCGCATTTCCCATGTGG
CCCAGCGTGGAGAAAGGGGTTGCCGAATTAATTCTCCAAATTGAACTTAAATTGGATGCGGACCCATATGCCGAT
TTTGCCTTGGCGGGTTATTCTCAAGGTGCGATTGTTGTAGGACAAGTTCTGAAACATCATATTATTAATCCTCGC
GGACGTTTGCATCGTTTTCTTCATCGTCTGCGCAAAGTAATTTTCTGGGGCAACCCCATGCGTCAGAAAGGTTTC
GCGCATACTGATGAATGGATCCATCAAGTGGCCGCAAGTGATACTATGGGTATTCTGGAAGATCGTTTGGAAAAT
CTTGAACAGTATGGTTTCGAAGTTCGTGATTATGCGCATGATGGTGATATGTACGCGAGTATTAAAGAAGATGAT
ATGCATGAATATGAAGTTGCGATCGGTCGTATTGTTATGTCTGCGCGTCGCTTTATTGGCGGAAAAGATTCAGTA
ATTGCGCAACTGATTGAACTGGGCCAACGCCCAATTTGGGAAGGCATTGCAATGGCTCGCGCTATTATTGATGCG
CTTACCTTCTTCGCGAAATCTACACAGGGGCCTTCGTGGCCTCACCTTTATAATCGTTTTCCAGCCGTAGAATTT
CTGCGTCGCATTTGA
Length: 254
Molecular weight: 28.84 kDa
Type: protein
Feature: contains the following domains:
Alpha/Beta hydrolase family 176→244
LysinB C-terminal linker domain; 3→251
Other information: LysB-L5
Sequence ID No: 28
MSKPWLFTVHGTGQPDPLGPGLPADTARDVLDIYRWQPIGNYPAAAFPMWPSVEKGVAELILQIELKLDADPYAD
FALAGYSQGAIVVGQVLKHHIINPRGRLHRFLHRLRKVIFWGNPMRQKGFAHTDEWIHQVAASDTMGILEDRLEN
LEQYGFEVRDYAHDGDMYASIKEDDMHEYEVAIGRIVMSARRFIGGKDSVIAQLIELGQRPIWEGIAMARAIIDA
LTFFAKSTQGPSWPHLYNRFPAVEFLRRI
Sequence ID No: 31
Length: 999
Type: DNA
Other information: LysB-Ms6
Sequence ID No: 30
ATGCGTATCGACGGCCAATATGTTGGATTAGGACCAGGGGATCGTTCGGACGAGATCCGCAAGATCAAAGCGTTC
ATGCGTCGCAAGTTCTCCTACGCAGCGACGCTGGCCGACACTGAGTTCTACGACGAGGCCATGACCGCTGTAGTC
GCCGAGATGCAATCCCGTTACAACACTGCTGGTCAGCTCCGCGACGGGTTGTACATCCCCGGGATTATCAACGCT
GAAACCAAGTACGTTATGGGATATTTGTCACGTCCAGTAATCGACACACGTCCAGTCCTGTTTACCGTATGCGGA
ACCGGCGTGCCTTGGTGGGTCGGCCCAGACGCCGACACCGCTCGCGCTGTTGAGGACCAATATTTATGGCAACCG
ATTGGTTATCCGGCCGCGCCCTTCCCAATGGGTCGTTCCATCACCGCGGGGATCACTGAGGCACACAACCAGGCG
AACCGCTGGCGCGAACGTATCGAAACTCACGGCACCGCCCTCGCAGGTTATTCTCAAGGCGCAGTCGTTCTTTCT
GAGTTATGGATGAACCACATCGCACCGGAAGACGGCTCGCTTCGCTGGATGAAACCACATGTACGTAAAGCAGTG
ACGTGGGGCAACCCGAACCGCGAATTAGGCCACGTGTGGGCCGATCACGGCGGCTCTCCTATGGCGCCAAGTAAC
ACTCAGGGCGTGTCGTCAAACGGAATGCGCAACACGCCTGACTGGTGGCGCGACTACGCCCACCAAGGCGACCTG
TACGCTTGCACCGAACCGGGAGACACCCAAGAGGTTCGCAACGCGATCTGGCAGATCGTCCGCGACCTGGACCTG
TTCACCGGACCAGATTCACTCCTTGCCCAAGTGATCGAACTGGCCCAAGCCCCTCTCCCTGAGACGATCGCGATC
ACTCGCGCGATCCTGGACGCGGGTATGTTCTTCGCGAAACGCACAGGCCCACACGTAGACTACAACCCGCAGCCA
GCGATCGACTATCTCCGCACGTGA
Length: 307
Molecular weight: 34.21 kDa
Type: protein
Feature: contains the following domains:
Putative peptidoglycan binding domain; 15→58
PE-PPE; 134→224
Cutinase; 120→208
LysinB C-terminal linker domain; 234→298
Other information: LysB-Ms6
Sequence ID No: 32
MRRKFSYAATLADTEFYDEAMTAVVAEMQSRYNTAGQLRDGLYIPGIINAETKYVMGYLSRPVIDTRPVLFTVCG
TGVPWWVGPDADTARAVEDQYLWQPIGYPAAPFPMGRSITAGITEAHNQANRWRERIETHGTALAGYSQGAVVLS
ELWMNHIAPEDGSLRWMKPHVRKAVTWGNPNRELGHVWADHGGSPMAPSNTQGVSSNGMRNTPDWWRDYAHQGDL
YACTEPGDTQEVRNAIWQIVRDLDLFTGPDSLLAQVIELAQAPLPETIAITRAILDAGMFFAKRTGPHVDYNPQP
AIDYLRT

[0070] In some embodiments, the domain with activity specific to an ester linkage is selected from the group consisting of D29 (SEQ ID NO: 6), Omega (SEQ ID NO: 18), Saal (SEQ ID NO: 20), Obama12 (SEQ ID NO: 24), Bxz2 (SEQ ID NO: 28), L5 (SEQ ID NO: 30), MS6 (SEQ ID NO: 32) and TDMH (SEQ ID NO: 34).

[0071] A domain (e.g. a third domain) with membrane permeabilising, destabilising and/or disrupting activity includes anything capable of causing membrane disruption (which may be termed “membrane lysers” (i.e. domains which are capable of lysing a membrane), “membrane permeabilisers” (i.e. domains which are capable of permeabilising a membrane), “membrane disrupters” (i.e. domains which are capable of disrupting a membrane) and/or “membrane destabilizers” (i.e. domains which are capable of destabilizing a membrane)). Such a domain is any domain which is capable of permeabilising and/or disrupting a membrane, preferably the outer membrane/outer leaflet. Such a domain may be an antimicrobial peptide (AMP), such as AMPs that are polycationic, hydrophobic, amphipathic, nano peptides, synthetic natural, Synthetic Mimics of Antimicrobial Peptides (SMAMPs), peptidomimetic oligomer, small molecules, polymeric mimics of AMPs, native AMPs, modified AMPs, or combinations thereof. AMPs may be derived from the same or different origins, for example AMPs may be derived from bacteria (e.g. bacteriocins), viruses, animals (including insects and mammals, e.g. human (such as defensins, including alpha and beta defensins)) and/or plants (such as defensins, thionins, α-hairpinins (hairpin-like peptides), hevein-like peptides, knottins, snakins, lipid-transfer proteins, and cyclotides). AMPs may be selected from the group consisting of: Cathelicidin-BF; Ci-MAM-A24 (Ciona-molecule against microbes A 24-residues); Ranalexin; Nigrocine-2; D-Piscidin 1 [I9K], Chain A, Moronecidin; Cecropin A; Protegrin-1, Chain A; SMAP-29, Sheep myeloid antimicrobial peptide; Lactoferricin B (LfcinB); IR2 (IR) 2-Protegrin-1 (8-13)-(RI) 2; (FR) 2-Protegrin-1 (8-13)-(FR) 2; CEM1; LL-37, Cathelicidin antimicrobial peptide preproprotein; Indolicidin, Cathelicidin-4 precursor; Magainin-2, Chain A; Cecropin A2; Cecropin P1; Pleurocidin precursor; Buforin II; Ascaphine 5; Tilapia Piscidin 4 (TP4); Epinecidin-1 prepropeptide; Chrysophsin-1; Piscidin-like peptide; Myxinidin; PAM2 (platypus antimicrobial 2); Pleurocidin-like peptide AP3 (23-45), NRC-13; 3IQ2 Ras GTPase-activating-like protein IQGAP3 (759-781); SSL-25, Variant and derivative from Dermcidin; KK-Temporin-B (G6A), (Chain A, temporinB_KKG6A); Fowlicidin-2 (1-31); E7K_19K_IsCT Chain A, Cytotoxic linear peptide IsCT; PCNP, Polycationic nonapeptide; E7K_IsCT, Chain A, Cytotoxic linear peptide IsCT; and combinations thereof.

[0072] The domains with membrane permeabilising, destabilising and/or disrupting activity may have been demonstrated to have activity against Gram-positive or Gram-negative bacteria, but may not have activity against mycobacteria when used in isolation. For example, Ranalexin has activity against Gram-positive and Gram-negative bacteria, but has not been shown to have activity against mycobacteria (as can be seen in the Database of Antimicrobial Activity and Structure of Peptides (DBAASP), see Peptide Card ID: 13797). However, use of Ranalexin as an AMP fused with a LysA and LysB has been shown herein to have activity against mycobacteria. Therefore, in some embodiments, the domain with membrane permeabilising, destabilising and/or disrupting activity may be a domain that does not have activity against mycobacteria in isolation (i.e. not fused to LysA and/or LysB), but exerts antimycobacterial activity following fusion to LysA and LysB.

[0073] In some embodiments, the domain may be an AMP that can permeabilise a cell membrane as defined herein, and/or the domain may be an AMP that destabilises (and/or disrupts) a cell membrane as defined herein. Membranes may be destabilised and/or disrupted (e.g. with an AMP) through chelating or competitively displacing the divalent cations that stabilise the membrane.

[0074] Such a domain may be a holin. By “Holins” we include proteins capable of forming pores in a host cell membrane. Holins are small proteins produced by dsDNA bacteriophages which are capable of triggering and controlling the permeabilization of a cell membrane. Holins form pores in the cell membrane, which can facilitate access for enzymes (such as those described for the first and second domains, above, e.g. lysins) to access other cell wall components, such as the peptidoglycan layer and/or other components of the cell wall. The other domains are then able to act on their respective targets.

[0075] By “Holins” we include Class I holins, Class II holins and Class III holins, and members of all seven (I to VII) Holin superfamilies. We also include pinholins. Also included are portions of holins that retain their required activity. For example, a holin of the present invention may be a holin or a portion thereof. For example, a portion thereof may be a transmembrane domain of holins, which may have a similar function as the full protein length. Pinholins form small heptameric pores that collapse the membrane potential (the PMF) across the inner membrane, while the more conventional holins form large multi-subunit pores of variable sizes. Holins are classified according to the topology of the seven superfamilies, and according to the mechanism into holins and pinholins.

[0076] Such a domain may be a spanin, such as those defined in Kongari et al., 2018 and available in the CPT Spanin Database (https://cpt.tamu.edu/spanindb/#/phages). By “spanin” we include bacteriophage peptides that span the outer membrane of gram-negative bacteria. Spanins include two-component spanins and unimolecular spanins. Prototype two-components spanins include the Rz-Rz1 from phage lambda comprising an integral inner membrane protein (i-spanin) and an outer membrane lipoprotein (o-spanin).

[0077] Such a domain may be a cationic or amphipatic domain present in the N- or C-terminus of a bacteriophage lysin. This domain may adopt a helix, random coil or sheet conformation and interact without the outer membrane. This domain may take over the role of a spanin in spanin-less phages. Such a domain may be selected from Lys1521, OBPgp279, PlyE146, EndoT5, SPN9CC, CfP1, LysAB2, LysAB3, LysAB4, PlyAB1, PlyF307, LysABP-01, ABgp46, LysPA26, LysAm24, LysECD7 and/or LysSi3 (Gutierrez Fernandez and Briers, 2020).

[0078] In one embodiment, the amino acid sequence of the domain with membrane permeabilising, destabilising and/or disrupting activity may be selected from any one or more of SEQ ID NOs: 34, 36, 38, 40, 42, 44, 46, 48, 50, 52, 54, 56, 58, 60, 62, 64, 66, 68, 70, 72, 74, 76, 78, 80, 82, 84, 86, 88, 90, 92, 94, 96, 98, 100 or 102; or may be encoded by any one or more of the nucleotide sequences of SEQ ID NO: 33, 35, 37, 39, 41, 43, 45, 47, 49, 51, 53, 55, 57, 59, 61, 63, 65, 67, 69, 71, 73, 75, 77, 79, 81, 83, 85, 87, 89, 91, 93, 95, 97, 99 or 101; as follows:

Length: 678
Type: DNA
Other information: Trehalose dimycolate hydrolase (TDMH)
Sequence ID No: 33
ATGACCATGGCCATCGTTATCTCCCTGCGTAAACCAGCGCGCTTAGCGGCTTTTGCTAGCGCGGTTTTATGTGCG
GGAGCGGCCTTAGCTACCGGTCCTGCTCCAGTTGCGTCTGCCGAACCGTGTAGTGATATTGAAGTCGTTTTCGCC
CGTGGTACCAGCGAGCCTGCAGGAATTGGGCGTGTGGGTCAAGCACTCACGGACGCCATTCGTAACCAAGTAGGC
GGTCGTACCGTGAGTACATATGGTGTAAATTATCCTGCGACTTATGATTTTCTTGCTGCCGCTGATGGTGCGAAT
GATGCTACGAATCGTATTGCCACATTAGCGGAACAATGTCCAAGTACCCGTGTGGTCTTAGGCGGGTATAGTCAA
GGTGCAGCAGTAGTAGATATGCTCTTAGGCATTCCACCGCTCGGGAATAAAGTTGGTAATTTTGGCAGTGCACCC
CCATTGCCTTCGAATCTGATGAATAATGTAGCAGCAGTGGCCGTCTTTGGTAATCCTTCTGCGAAATTTGGGATT
CCTGTGACATCGCGCTTTGGTGGTCGTGCCATTGATGCATGTTCAGATGGAGATCCCATTTGCAGCGATGGCCGT
AATCCATTTGCCCATACACACTATGAATCAAGCCCATTTATTCCTCAAGCGGCCGGCTTAATTGCCGGCTTAGTA
TGA
Length: 225
Molecular weight: 22.68 kDa
Type: protein
Feature: contains the following domains:
Signal peptide Gram-positive entry; 1→39
Cutinase; 41→212
Other information: Trehalose dimycolate hydrolase (TDMH)
Sequence ID No: 34
MTMAIVISLRKPARLAAFASAVLCAGAALATGPAPVASAEPCSDIEVVFARGTSEPAGIGRVGQALTDAIRNQVG
GRTVSTYGVNYPATYDFLAAADGANDATNRIATLAEQCPSTRVVLGGYSQGAAVVDMLLGIPPLGNKVGNFGSAP
PLPSNLMNNVAAVAVFGNPSAKFGIPVTSRFGGRAIDACSDGDPICSDGRNPFAHTHYESSPFIPQAAGLIAGLV
Length: 90
Type: DNA
Organism: Snake venom of Bungarus fasciatus
Other information: Cathelicidin-BF
Sequence ID No: 35
AAATTTTTTCGGAAACTGAAAAAGTCCGTGAAAAAGCGCGCGAAAGAATTTTTCAAAAAGCCGCGGGTAATCGGC
GTGTCCATTCCTTTT
Length: 30
Molecular weight: 3.63 kDa
Type: Protein
Organism: Snake venom of Bungarus fasciatus
Feature: Helix
Other information: Cathelicidin-BF
Sequence ID No: 36
KFFRKLKKSVKKRAKEFFKKPRVIGVSIPF
Length: 72
Type: DNA
Organism: Haemocytes of Ciona intestinalis
Other information: Ci-MAM-A24 (Ciona-molecule against microbes A
24-residues)
Sequence ID No: 37
TGGCGCTCCCTGGGTCGTACGCTGTTACGTCTGTCCCATGCTCTGAAACCGCTGGCGCGCCGTTCCGGGTGG
Length: 24
Molecular weight: 2.83 kDa
Type: Protein
Organism: Haemocytes of Ciona intestinalis
Feature: Helix, cationic
Other information: Ci-MAM-A24 (Ciona-molecule against microbes A
24-residues)
Sequence ID No: 38
WRSLGRTLLRLSHALKPLARRSGW
Length: 61
Type: DNA
Organism: skin of Rana catesbeiana (Bull frog)
Other information: Ranalexin
Sequence ID No: 39
TTTTTGGGAGGCTTAATAAAGATCGTTCCAGCAATGATTTGTGCAGTGACCAAAAAATGTT
Length: 20
Molecular weight: 2.1 kDa
Type: Protein
Organism: skin of Rana catesbeiana (Bull frog)
Feature: helix
Other information: Ranalexin
Sequence ID No: 40
FLGGLIKIVPAMICAVTKKC
Length: 62
Type: DNA
Organism: skin of Pelophylax nigromaculatus (dark-spotted frog)
Other information: Nigrocine-2
Sequence ID No: 41
GGTCTCCTGTCCAAAGTACTGGGCGTTGGCAAAAAAGTGCTGTGCGGTGTCTCTGGTCTGGT
Length: 21
Molecular weight: 2.03 kDa
Type: Protein
Organism: skin of Pelophylax nigromaculatus (dark-spotted frog)
Feature: Amphipathic, α-helix
Other information: Nigrocine-2
Sequence ID No: 42
GLLSKVLGVGKKVLCGVSGLC
Length: 66
Type: DNA
Organism: Mast cells of Morone saxatilis
Other information: D-Piscidin 1 [I9K], Chain A, Moronecidin
Sequence ID No: 43
TTCTTCCATCATATTTTCCGCGGCAAAGTCCATGTGGGCAAGACCATTCATCGCTTAGTAACGGGT
Length: 22
Molecular weight: 2.58 kDa
Type: Protein
Organism: Mast cells of Morone saxatilis
Feature: Helix
Other information: D-Piscidin 1 [I9K], Chain A, Moronecidin
Sequence ID No: 44
FFHHIFRGKVHVGKTIHRLVTG
Length: 120
Type: DNA
Organism: Drosophila melanogaster
Other information: Cecropin A
Sequence ID No: 45
GGCTGGCTGAAAAAAATTGGCAAAAAAATCGAACGCGTGGGCCAGCACACGCGTGATGCAACCATCCAGGGTCTG
GGTATCCCACAGCAGGCAGCTAACGTAGCCGCGACTGCTCGTGGT
Length: 40
Molecular weight: 4.23 kDa
Type: Protein
Organism: Drosophila melanogaster
Feature: cationic, helical
Other information: Cecropin A
Sequence ID No: 46
GWLKKIGKKIERVGQHTRDATIQGLGIPQQAANVAATARG
Length: 54
Type: DNA
Organism: Leukocytes of Sus scrofa
Other information: Protegrin-1, Chain A
Sequence ID No: 47
CGTGGCGGTCGTCTGTGTTACTGCCGTCGCCGTTTCTGCGTGTGTGTTGGTCGT
Length: 18
Molecular weight: 2.16 kDa
Type: Protein
Organism: Leukocytes of Sus scrofa
Feature: Cyclic, Cationic
Other information: Protegrin-1, Chain A
Sequence ID No: 48
RGGRLCYCRRRFCVCVGR
Length: 87
Type: DNA
Organism: Leukocytes of Ovis aries
Other information: SMAP-29, Sheep myeloid antimicrobial peptide
Sequence ID No: 49
CGTGGTCTGCGTCGCCTGGGTCGCAAAATTGCGCACGGCGTCAAAAAATACGGCCCGACCGTGCTGCGCATTATC
CGCATCGCTGGT
Length: 29
Molecular weight: 3.25 kDa
Type: Protein
Organism: Leukocytes of Ovis aries
Feature: helical
Other information: SMAP-29, Sheep myeloid antimicrobial peptide
Sequence ID No: 50
RGLRRLGRKIAHGVKKYGPTVLRIIRIAG
Length: 45
Type: DNA
Organism: Bos taurus
Other information: Lactoferricin B (LfcinB)
Sequence ID No: 51
TTTAAATGTCGTCGCTGGCAATGGCGTATGAAAAAACTGGGGGCG
Length: 15
Molecular weight: 1.994 kDa
Type: Protein
Organism: Bos taurus
Feature: Beta, cationic
Other information: Lactoferricin B (LfcinB)
Sequence ID No: 52
FKCRRWQWRMKKLGA
Length: 42
Type: DNA
Organism: synthetic variant of Protegrin-1
Other information: IR2 (IR) 2-Protegrin-1 (8-13)-(RI) 2
Sequence ID No: 53
ATCCGGATCCGTTGCCGTCGCCGGTTCTGCCGCATTCGTATT
Length: 14
Molecular weight: 2.41 kDa
Type: Protein
Organism: synthetic variant of Protegrin-1
Feature: helix
Other information: IR2 (IR) 2-Protegrin-1 (8-13)-(RI) 2
Sequence ID No: 54
IRIRCRRRFCRIRI
Length: 42
Type: DNA
Organism: synthetic variant of Protegrin-1
Other information: (FR) 2-Protegrin-1 (8-13)-(FR) 2
Sequence ID No: 55
TTCCGCTTTCGTTGTCGCCGGCGTTTTTGTCGGTTCCGCTTC
Length: 14
Molecular weight: 2.05 kDa
Type: Protein
Organism: synthetic variant of Protegrin-1
Feature: helix
Other information: (FR) 2-Protegrin-1 (8-13)-(FR) 2
Sequence ID No: 56
FRFRCRRRFCRFRF
Length: 36
Type: DNA
Organism: synthetic variant of MSI-78 (1-12)
Other information: CEM1
Sequence ID No: 57
GGCATTGGTAAGTTCCTGAAAAAAGCGAAGAAATTT
Length: 12
Molecular weight: 1.364 kDa
Type: Protein
Organism: synthetic variant of MSI-78 (1-12)
Feature: helix
Other information: CEM1
Sequence ID No: 58
GIGKFLKKAKKF
Length: 111
Type: DNA
Organism: Neutrophil specific granules of Homo sapiens
Other information: LL-37, Cathelicidin antimicrobial peptide preproprotein
Sequence ID No: 59
CTCCTGGGTGACTTCTTTCGCAAATCCAAAGAGAAAATCGGCAAAGAGTTCAAACGTATCGTGCAGCGCATTAAA
GACTTTCTGCGTAACCTGGTTCCGCGTACCGAATCT
Length: 37
Molecular weight: 3.25 kDa
Type: Protein
Organism: Neutrophil specific granules of Homo sapiens
Feature: Amphipathic, helical
Other information: LL-37, Cathelicidin antimicrobial peptide preproprotein
Sequence ID No: 60
LLGDFFRKSKEKIGKEFKRIVQRIKDFLRNLVPRTES
Length: 39
Type: DNA
Organism: Neutrophils of Bos taurus [Bovine]
Other information: Indolicidin, Cathelicidin-4 precursor
Sequence ID No: 61
ATCCTGCCGTGGAAATGGCCGTGGTGGCCATGGCGTCGC
Length: 13
Molecular weight: 1.907 kDa
Type: Protein
Organism: Neutrophils of Bos taurus [Bovine]
Other information: Indolicidin, Cathelicidin-4 precursor
Sequence ID No: 62
ILPWKWPWWPWRR
Length: 69
Type: DNA
Organism: skin and Stomach of African clawed frog Xenopus laevis
Other information: Magainin-2, Chain A
Sequence ID No: 63
GGTATCGGCAAATTCCTGCACTCCGCAAAAAAATTCGGCAAAGCTTTCGTGGGCGAAATTATGAACTCT
Length: 23
Molecular weight: 2.46 kDa
Type: Protein
Organism: skin and Stomach of African clawed frog Xenopus laevis
Feature: Helical, cationic
Other information: Magainin-2, Chain A
Sequence ID No: 64
GIGKFLHSAKKFGKAFVGEIMNS
Length: 108
Type: DNA
Organism: Aedes aegypti
Other information: Cecropin A2
Sequence ID No: 65
GGCGGCCTGAAAAAACTGGGCAAAAAACTGGAAGGTGCCGGCAAACGTGTGTTCAACGCTGCAGAAAAAGCACTG
CCGGTTGTAGCTGGTGCTAAAGCTCTCCGTAAA
Length: 36
Molecular weight: 3.67 kDa
Type: Protein
Organism: Aedes aegypti
Feature: Helix
Other information: Cecropin A2
Sequence ID No: 66
GGLKKLGKKLEGAGKRVFNAAEKALPVVAGAKALRK
Length: 93
Type: DNA
Organism: Ascaris suum
Other information: Cecropin P1
Sequence ID No: 67
TCTTGGCTGAGCAAAACCGCGAAAAAACTGGAGAACTCCGCCAAAAAACGCATCTCTGAAGGCATTGCTATTGCA
ATCCAGGGTGGTCCGCGT
Length: 31
Molecular weight: 3.67 kDa
Type: Protein
Organism: Ascaris suum
Feature: Helix
Other information: Cecropin P1
Sequence ID No: 68
SWLSKTAKKLENSAKKRISEGIAIAIQGGPR
Length: 75
Type: DNA
Organism: the skin mucous secretions of Winter flounder Pleuronectes
americanus
Other information: Pleurocidin precursor
Sequence ID No: 69
GGCTGGGGTTCTTTCTTTAAAAAAGCGGCTCACGTTGGCAAACATGTAGGTAAAGCAGCTCTGACCCACTATCTG
Length: 25
Molecular weight: 2.71 kDa
Type: Protein
Organism: the skin mucous secretions of Winter flounder Pleuronectes
americanus
Feature: Helix
Other information: Pleurocidin precursor
Sequence ID No: 70
GWGSFFKKAAHVGKHVGKAALTHYL
Length: 63
Type: DNA
Organism: derivative of buforin I (from stomach of Bufo bufo) after
treatment with endoproteinase
Other information: Buforin II
Sequence ID No: 71
ACCCGTAGCTCTCGTGCTGGCCTGCAGTTTCCGGTTGGTCGCGTGCACCGTCTGCTCCGCAAA
Length: 21
Molecular weight: 2.43 kDa
Type: Protein
Organism: derivative of buforin I (from stomach of Bufo bufo) after
treatment with endoproteinase
Feature: Helix, cationic
Other information: Buforin II
Sequence ID No: 72
TRSSRAGLQFPVGRVHRLLRK
Length: 72
Type: DNA
Organism: skin of Ascaphus truei (tailed frog)
Other information: Ascaphine 5
Sequence ID No: 73
GGTATCAAAGATTGGATCAAAGGCGCAGCGAAAAAACTGATCAAAACCGTTGCCTCTCACATTGCTAACCAG
Length: 24
Molecular weight: 2.59 kDa
Type: Protein
Organism: skin of Ascaphus truei (tailed frog)
Feature: helix
Other information: Ascaphine 5
Sequence ID No: 74
GIKDWIKGAAKKLIKTVASHIANQ
Length: 75
Type: DNA
Organism: gills of Nile Tilapia, Oreochromis niloticus
Other information: Tilapia Piscidin 4 (TP4)
Sequence ID No: 75
TTTATCCATCACATTATTGGTGGTCTGTTCTCCGCAGGTAAAGCAATTCATCGCCTGATTCGGCGTCGTCGGCGC
Length: 25
Molecular weight: 2.98 kDa
Type: Protein
Organism: gills of Nile Tilapia, Oreochromis niloticus
Other information: Tilapia Piscidin 4 (TP4)
Sequence ID No: 76
FIHHIIGGLESAGKAIHRLIRRRRR
Length: 75
Type: DNA
Organism: orange-spotted grouper, Epinephelus coioides
Other information: Epinecidin-1 prepropeptide
Sequence ID No: 77
TTTATCTTTCACATTATTAAAGGTCTGTTCCATGCGGGGAAAATGATCCACGGCTTAGTGACCCGGCGTCGCCAT
Length: 25
Molecular weight: 2.98 kDa
Type: Protein
Organism: orange-spotted grouper, Epinephelus coioides
Other information: Epinecidin-1 prepropeptide
Sequence ID No: 78
FIFHIIKGLFHAGKMIHGLVTRRRH
Length: 75
Type: DNA
Organism: the pyloric caeca and gills of Red sea bream Chrysophrys
major or Pagrus major
Other information: Chrysophsin-1
Sequence ID No: 79
TTCTTTGGATGGCTTATCAAAGGCGCAATTCATGCTGGGAAAGCGATTCATGGCCTTATCCATCGCCGTCGTCAT
Length: 25
Molecular weight: 2.89 kDa
Type: Protein
Organism: the pyloric caeca and gills of Red sea bream, Chrysophrys
major or Pagrus major
Feature: Helix
Other information: Chrysophsin-1
Sequence ID No: 80
FFGWLIKGAIHAGKAIHGLIHRRRH
Length: 66
Type: DNA
Organism: Spleen of Larimichthys crocea (large yellow croaker)
Other information: Piscidin-like peptide
Sequence ID No: 81
ATCTGGGGCTTAATCGCGCACGGGGTGGGTCATGTTGGACGTCTGATTCATGGCCTGATTCGCGGT
Length: 22
Molecular weight: 2.33 kDa
Type: Protein
Organism: Spleen of Larimichthys crocea (large yellow croaker)
Feature: Helix
Other information: Piscidin-like peptide
Sequence ID No: 82
IWGLIAHGVGHVGRLIHGLIRG
Length: 36
Type: DNA
Organism: Epidermal mucus of Myxine glutinosa
Other information: Myxinidin
Sequence ID No: 83
GGTATTCATGATATCCTGAAATATGGCAAACCGAGC
Length: 12
Molecular weight: 1.32 kDa
Type: Protein
Organism: Epidermal mucus of Myxine glutinosa
Feature: Helix
Other information: Myxinidin
Sequence ID No: 84
GIHDILKYGKPS
Length: 66
Type: DNA
Organism: Ornithorhynchus anatinus
Other information: PAM2 (platypus antimicrobial 2)
Sequence ID No: 85
CGCCCGTGGGCGGGCAACGGCAGCGTGCATCGCTATACCGTGCTGAGCCCGCGCCTGAAAACCCAG
Length: 22
Molecular weight: 2.52 kDa
Type: Protein
Organism: Ornithorhynchus anatinus
Other information: PAM2 (platypus antimicrobial 2)
Sequence ID No: 86
RPWAGNGSVHRYTVLSPRLKTQ
Length: 69
Type: DNA
Organism: Hippoglossoides platessoides
Other information: Pleurocidin-like peptide AP3 (23-45) , NRC-13
Sequence ID No: 87
GGCTGGCGCACCCTGCTGAAAAAAGCGGAAGTGAAAACCGTGGGCAAACTGGCGCTGAAACATTATCTG
Length: 23
Molecular weight: 2.65 kDa
Type: Protein
Organism: Hippoglossoides platessoides
Other information: Pleurocidin-like peptide AP3 (23-45) , NRC-13
Sequence ID No: 88
GWRTLLKKAEVKTVGKLALKHYL
Length: 69
Type: DNA
Organism: Synthetic construct from Human cytoskeletal scaffolding proteins
IQGAP3
Other information: 31Q2 Ras GTPase-activating-like protein IQGAP3 (759-781)
Sequence ID No: 89
ACCTGGCTCCCAGCAGTAATTAAGATCCAGGCGCATTGGCGGGGCTATCGTCAGCGTAAGATTTATCTG
Length: 23
Molecular weight: 2.89 kDa
Type: Protein
Organism: Synthetic construct from Human cytoskeletal scaffolding proteins
IQGAP3
Feature: hydrophobic
Other information: 3IQ2 Ras GTPase-activating-like protein IQGAP3 (759-781)
Sequence ID No: 90
TWLPAVIKIQAHWRGYRQRKIYL
Length: 75
Type: DNA
Organism: Eccrine sweat glands, skin, Homo sapiens
Other information: SSL-25, Variant and derivative from Dermcidin
Sequence ID No: 91
AGCTCGCTTCTGGAAAAAGGGTTGGACGGCGCCAAAAAAGCGGTTGGCGGCCTTGGTAAACTGGGGAAAGACGCC
Length: 25
Molecular weight: 2.41 kDa
Type: Protein
Organism: Eccrine sweat glands, skin, Homo sapiens
Feature: helix
Other information: SSL-25, Variant and derivative from Dermcidin
Sequence ID No: 92
SSLLEKGLDGAKKAVGGLGKLGKDA
Length: 45
Type: DNA
Organism: synthetic
Other information: KK-Temporin-B (G6A) , (Chain A, temporinB_KKG6A)
Sequence ID No: 93
AAAAAATTACTGCCCATCGTCGCCAATCTCCTGAAATCCCTTTTA
Length: 15
Molecular weight: 1.663 kDa
Type: Protein
Organism: synthetic
Other information: KK-Temporin-B (G6A) , (Chain A, temporinB_KKG6A)
Sequence ID No: 94
KKLLPIVANLLKSLL
Length: 93
Type: DNA
Organism: Gallus gallus
Other information: Fowlicidin-2 (1-31)
Sequence ID No: 95
TTAGTACAGCGCGGGCGTTTTGGTCGTTTCCTGCGCAAAATCCGTCGTTTTCGTCCAAAAGTCACGATTACGATC
CAGGGTAGTGCCCGTTTT
Length: 31
Molecular weight: 3.76 kDa
Type: Protein
Organism: Gallus gallus
Feature: Helix
Other information: Fowlicidin-2 (1-31)
Sequence ID No: 96
LVQRGRFGRFLRKIRRFRPKVTITIQGSARF
Length: 39
Type: DNA
Organism: Scorpion venom of Opisthacanthus madagascariensis
Other information: E7K 19K IsCT Chain A, Cytotoxic linear peptide IsCT
Sequence ID No: 97
ATTCTGGGCAAAATTTGGAAAGGCAAAAAAAGCCTGTTT
Length: 13
Molecular weight: 1.517 kDa
Type: Protein
Organism: Scorpion venom of Opisthacanthus madagascariensis
Feature: Helix
Other information: E7K I9K IsCT, Chain A, Cytotoxic linear peptide IsCT
Sequence ID No: 98
ILGKIWKGKKSLF
Length: 27
Type: DNA
Organism: Synthetic
Other information: PCNP, Polycationic nonapeptide
Sequence ID No: 99
AAACGCAAGAAACGTAAGAAACGCAAA
Length: 9
Molecular weight: 1.255 kDa
Type: Protein
Organism: Synthetic
Feature: Polycationic
Other information: PCNP, Polycationic nonapeptide
Sequence ID No: 100
KRKKRKKRK
Length: 39
Type: DNA
Organism: Scorpion venom of Opisthacanthus madagascariensis
Other information: E7K IsCT, Chain A, Cytotoxic linear peptide IsCT
Sequence ID No: 101
ATTCTGGGCAAAATTTGGAAAGGCATTAAAAGCCTGTTT
Length: 13
Molecular weight: 1.502 kDa
Type: Protein
Organism: Scorpion venom of Opisthacanthus madagascariensis
Feature: Helix
Other information: E7K IsCT, Chain A, Cytotoxic linear peptide IsCT
Sequence ID No: 102
ILGKIWKGIKSLF

[0079] As discussed above, the peptides of the present invention (comprising the three domains as outlined above) are capable of targeting cell envelopes and acting on these to exert an effect on the membrane as well as the cell wall. Such peptides may permeabilise the membrane and break down the cell wall to disrupt bacteria and exert an antibacterial effect.

[0080] Membranes/cell walls of interest for the present invention (e.g. membranes targeted by peptides of the present invention) are comprised of multiple components (see FIG. 1). Target membranes (or target organisms comprising such membranes) may comprise any one or more of the following components: (i) an outer leaflet (also known as the outer membrane); (ii) an inner leaflet; (iii) an arabinogalactan layer; and/or (iv) a peptidoglycan layer. Target membranes (or organisms) may further comprise: (v) a periplasmic space; (vi) a granular layer; and/or (vii) an inner membrane. By “cell envelope” we also include the meaning of the equivalent terms “cell wall” and “cell membrane”.

[0081] The compositions of the layers are as described in Vincent et al., 2018. The granular layer is between the peptidoglycan layer and plasma membrane, which may be linked to the plasma membrane and composed of penicillin-binding proteins, lipoproteins, and lipoteichoic acids (or teichuronic acid in some species). The peptidoglycan layer is comprised of short peptides and glycan strands that are composed of N-acetylglucosamine and N-acetylmuramic acid residues linked by β-1→4 bonds. The arabinogalactan layer may also be attached to the peptidoglycan layer (such as via covalent links to the N-acetylmuramic acid residues and Lcp1). The inner leaflet of the external mycomembrane is homogeneous and mainly composed of mycolic acids (MAS). These MAs are long chain fatty acids that are exclusive to the order Corynebacteriales, and can form a barrier to hydrophilic molecules, including some antibiotics. The outer leaflet is highly heterogeneous and consists of lipids (such as phthiocerol dimycocerosate (PDIM), phenolic glycolipid (PGL, phenolphthiocerol-based glycolipids that share a similar long-chain fatty acid backbone with PDIM), and lipooligosaccharides (LOS)), lipoglycans and proteins. The outer leaflet may also contain trehalose monomycolate (TMM) and trehalose dimycolate (TDM), which consist of glucose disaccharides (α-D-glucopyranosyl-α-D-glucopyranoside) esterified with MAs.

[0082] Accordingly, peptides of the present invention may be defined by the type of membrane they are capable of targeting. In one embodiment the peptide is capable of targeting a mycobacterial cell envelope (including a cell wall/cell membrane, for example, the mycomembrane). Membranes of interest may also be defined by their thickness. For example, a mycobacterial cell envelope is typically made up of: (i) an outer leaflet and inner leaflet of about 7.5 nm (collectively also known as the mycomembrane); (ii) arabinogalactan and peptidoglycan layers of about 6.3 nm (total); a periplasmic space of about 14.1 nm; a granular layer of about 3.8 nm; and an inner membrane of about 6.3 nm. Thus, a typical mycobacterial cell envelope is a total of about 38 nm. Mycobacterial strains with drug resistance may have a thicker cell envelope. Velayati et al., 2009 demonstrated through transmission electron microscopy (TEM) that there are marked differences in the thickness of cell envelopes between extensively drug-resistant (XDR; 20.2±1.5 nm), multidrug-resistant (MDR; 17.1±1.03 nm) and susceptible tuberculosis (TB; 15.6±1.3 nm) bacilli.

[0083] Thus, peptides of the present invention may be peptides capable of causing lysis of a membrane that is at least 10 nm, 15 nm, 20 nm, 25 nm, 30 nm, 35 nm, 40 nm, 45 nm, 50 nm or more in thickness.

[0084] The outer leaflet and inner leaflet may collectively be termed the “outer membrane”. Therefore, domains of the present invention that have membrane permeabilising activity may be outer membrane permeabilisers that may target the outer membrane (or component thereof). Membrane permeabilisers may target an inner membrane (or component thereof). Membrane permeabilisers may target the outer leaflet, inner leaflet, both the outer and inner leaflet, and/or the inner membrane. For example, membrane permeabilisers may target the inner leaflet of the outer membrane and the inner membrane, but not the outer leaflet of the outer membrane. Alternatively, membrane permeabilisers may target only the outer leaflet of the outer membrane or only the inner leaflet of the outer membrane. Alternatively, membrane permeabilisers may target each leaflet of the outer membrane and the inner membrane.

[0085] The targeting of the outer leaflet, inner leaflet and/or inner membrane may be achieved by using multiple membrane permeabilisers. For example, a first membrane permeabiliser that targets the outer leaflet may be used in combination (for example, as a fusion peptide) with a second membrane permeabiliser that targets the inner leaflet. Alternatively, or additionally, a first membrane permeabiliser may target the outer leaflet, inner leaflet and inner membrane, and at least one further membrane permeabiliser is included that targets any one or more of these layers. Combinations of membrane permeabilisers are contemplated that may work additively or synergistically with each other. Accordingly, the requirement to target the outer leaflet, inner leaflet and inner membrane (if required for the target cell membrane and/or organism comprising said membrane) may be built up (and/or enhanced) by including multiple membrane permeabilisers, whether as multiple copies of the same membrane permeabilisers or as multiple different membrane permeabilisers.

[0086] In some embodiments, the membrane permeabiliser is an antimicrobial peptide (AMP) or portion thereof. The AMP or a portion thereof may be cationic, polycationic, hydrophobic, amphipathic, synthetic, natural, native or modified, or any combination thereof, whether from different origins (for example, bacteria, fungi, viruses, animals, insects, humans) or the same origin. For example, an AMP may be cationic. Alternatively, an AMP may be cationic in a portion and amphipathic in a different portion of the same AMP. Alternatively, or additionally, multiple AMPs with the same or different properties may be present in a peptide of the present invention.

[0087] In some embodiments, the membrane permeabiliser is associated with a non-AMP mechanism, for example the membrane permeabiliser may be at least one holin, as described above. Holins and AMPs may be used in combination.

[0088] A domain (e.g. a fourth domain) may correspond to a protein transduction domain (PTD). These may also be referred to as protein transducing domains. Such domains may be added to peptides of the present invention to facilitate transduction (e.g. protein/peptide transduction). By “transduction” we include the meaning that internalization is facilitated, or allowing the passage across a cell membrane or portion thereof. Further, a PTD may also be classified as a cell-penetrating peptide (CPP), which may be capable of targeting intracellularly components, including intracellular proteins. For example, a peptide further comprising a fourth domain that is at least one PTD/CPP (use of “PTD” herein is to be construed as also including “CPP”) may have improved transduction efficiency compared with the same peptide lacking such a domain. Key benefits to a PTD domain include, but are not limited to, improved efficacy of fusion proteins, improved transduction efficiency, improved safety, and/or improved stability. The targeting of mycobacteria by peptides may be facilitated by at least one PTD if the mycobacteria are present inside of cells, such as macrophages. Example PTDs include those described in Bechara and Sagan, 2013. For example, the PTD may be protein-derived (such as Penetratin, Tat peptide, pVEC); chimeric (such as Transportan, MPG, Pep-1); and/or synthetic (such as Polyarginines, MAP, R₆W₃). Accordingly, in some embodiments, one or more PTD is selected from the group consisting of Penetratin, Tat peptide, pVEC, Transportan, MPG, Pep-1, Polyarginines, MAP, R₆W₃. In some embodiments, the PTDs are cationic poly-Arg containing PTDs, for example PTD3 and/or TAT.

[0089] Any of the above that references a particular domain is intended to also be reference to a fragment (e.g. a truncated version), variant (which includes mutants), fusion or derivative thereof, or a fusion of said fragment, variant or derivative thereof of said domain, in addition to any wildtype domains. For example, at least one membrane permeabiliser may be a fragment (e.g. a fragment with substantially the same function) of a membrane permeabiliser, combined with at least one wildtype LysA, at least one variant LysB and at least one wildtype PTD. Any of these domains (if present in the fusion protein) may be presented as any “version” (i.e. fragment, variant, fusion or derivative thereof, or a fusion of said fragment, variant or derivative thereof, wildtype) without limitation to the version of any other domain that is present. Any domains described herein may be natural (i.e. wildtype) or synthetic domains.

[0090] Any domain referred to herein may be a fragment, variant, fusion or derivative thereof, or a fusion of said fragment, variant or derivative thereof. In one embodiment, the variant has an amino acid sequence which has at least 50% identity with the amino acid sequence according to a reference sequence (for example, the amino acid sequences of SEQ ID NOS: 1-102, or SEQ ID NOs: 326 to 338), or a fragment thereof, for example at least 55%, 60%, 65%, 70%, 75%, 80%, 85%, 90%, 95%, 96%, 97%, 98% or at least 99% identity, optionally wherein the fragment, variant, fusion or derivative thereof, or a fusion of said fragment, variant or derivative thereof retains substantially the same level of activity of the wildtype domain. Substantially the same level of activity may be at least 10%, 20%, 30%, 40%, 50%, 60%, 70%, 80%, 90%, 95%, 96%, 97%, 98%, 99%, 100% or higher activity compared with the wildtype domain.

[0091] In some embodiments, the peptide corresponds to the amino acid sequence (or a nucleic acid sequence that encodes the amino acid sequence) according to any one or more of SEQ ID NOs: 147-311, or a fragment, variant, fusion or derivative thereof, or a fusion of said fragment, variant or derivative thereof. In one embodiment, the variant has an amino acid sequence which has at least 50% identity with the amino acid sequence (or a nucleic acid sequence that encodes the amino acid sequence) according to SEQ ID NOS: 147-311), or a fragment thereof, for example at least 55%, 60%, 65%, 70%, 75%, 80%, 85%, 90%, 95%, 96%, 97%, 98% or at least 99% identity, optionally wherein the fragment, variant, fusion or derivative thereof, or a fusion of said fragment, variant or derivative thereof retains substantially the same level of activity of the wildtype domain. Substantially the same level of activity may be at least 10%, 20%, 30%, 40%, 50%, 60%, 70%, 80%, 90%, 95%, 96%, 97%, 98%, 99%, 100% or higher activity compared with the wildtype domain.

[0092] Accordingly, exemplary active constructs of the present invention may be selected from SEQ ID NOS: 147-311, some of which are included below, as follows:

```
Sequence Id1 (1B4)
  (SEQ ID NO: 147)
ATGCACCATCATCATCATCATTCTTCTGGTGTAGATCTGGGTACCGAGAACCTGTACTTCCAATCCATGCGTGGC
GGTCGTCTGTGTTACTGCCGTCGCCGTTTCTGCGTGTGTGTTGGTCGTGGTGCAAGCAAGCCCTGGCTGTTCACC
GTTCACGGCACGGGCCAGCCCGATCCCCTCGGGCCTGGCCTGCCTGCCGATACGGCACGCGACGTACTTGACATC
TACCGGTGGCAGCCCATCGGCAACTACCCCGCTGCGGCCTTCCCGATGTGGCCGTCGGTCGAGAAGGGTGTCGCC
GAGCTGATCCTGCAGATCGAGCTGAAGCTGGACGCGGACCCCTACGCGGACTTCGCGATGGCGGGTTACTCGCAG
GGAGCCATCGTGGTTGGCCAGGTGCTCAAGCACCACATCCTGCCTCCGACGGGCAGGCTCCACAGGTTCCTGCAC
CGGCTCAAGAAGGTCATCTTCTGGGGTAATCCCATGCGGCAGAAGGGCTTTGCCCACTCTGACGAGTGGATCCAC
CCGGTCGCTGCCCCTGACACCCTCGGAATCCTCGAGGACCGGCTCGAAAACCTGGAGCAGTACGGCTTCGAGGTC
CGCGACTACGCCCACGACGGTGACATGTACGCCTCCATCAAAGAGGACGACCTGCACGAATACGAGGTCGCCATC
GGCCGGATCGTGATGAAGGCCAGCGGCTTCATCGGTGGCCGGGACTCCGTGGTAGCCCAGCTCATCGAGCTTGGC
CAGCGTCCGATCACCGAGGGAATTGCGTTGGCGGGAGCCATCATCGACGCCCTCACGTTCTTCGCCCGCTCTCGT
ATGGGCGACAAGTGGCCGCACCTCTACAACCGCTACCCGGCGGTCGAGTTCCTACGACAGATCGCAGGTCCAGCC
GTTCCACCTCCGGGAAGCTCATTTACGCGCTTTCTCCAAGACGATCCCTTGCTGACTCGTGAACAGGTAATGGCA
GAACTCATCCGCGTTGCTGATGATGAATTGAATATGCCTGATAAACGTGGAGCATGTGTGATCGCAGGAATGACT
ATCTCACAGGAAGTTGGTGTGAAAGATAATGATCCCCCATTTGAACGCCGTTTCTGGTGTCCAGCAAATCGTGCG
GATCCAGAGTCTTTTAATTATCCACATGATAGTGAGTCCAATGATGGACGTTCAGTGGGGTATTTTCAACAACAA
AAGGGCCCAAATGGTGAACTTTGGTGGGGCACTACCGCGAGTGAAATGAATTTACATAGTGCAGCCACCCAATTC
ATGACTCGTTTAAAAGCCGCGGGTTATAATGCCTCTAATGCGCAAGCCGCAAATGATTCTGCTCAAGCTATTCAA
CGTTCAGGTGTTCCACAAGCCTATAAACAGTGGTGGGATGATATCAATCGTTTATATGATAAAGTAAAAGGTAGC
GGCGGCGGACCCGCACCGGCTCCCAAACCACCTCAAAGCGGTCCTTGGACTGGTGATCCTGTTTGGTTAGCAGAT
GTATTACGTGCAGAAGGCTTGAATGTTGTTGAACTCCCTGGTTGGTTAGATCGTGGTCATGGAGATATGGGTCGT
CTGTGGGGCGTCGTATGTCACCATACTGGTAGTGACAATACTCCAAGCTCTGAAATCGCATTCCATCCCAGCCTG
GGTCTTTGTTCCCAAATCCATCTTGCCCGTAATGGTACGGTTACACTTTGTGGCGTTGGTATTGCGTGGCACGCA
GGAGTGGGATCGTACCCGGGGTTGCCGGAAGATAATGCAAATGCCGTGACAATTGGTATTGAAGCACAAAATTCG
GGTACATACGATGGTGCTCCTCATCGCACCAACTGGCCGGATGCACAGTATGATGCGTACGTCAAATGTTGTGCG
GCTATTTGTCGTCGTCTGGGAGTCCGTGCAGACCATGTAATTTCGCATAAAGAGTGGGCGGGCCGTAAACAGGGT
AAGTGGGACCCGGGAGCGATTGATATGAATATTTTCCGTGCGGATGTTCAACGTCGTATTGATGCGCACCAGCCG
AATGGTGAAGATGACTTTATGGCGGCTCTGAGCGCGGATGAACAACGTGAAGTTTTGAATCTTTTGCGTGTTTTA
GCGGATCGCCGCTTTGTGAGTCGTTCACCTTTTCGTCATCTCGGTGAAGGTCCATCCGAGACGGTAGCGGGCTTT
GGTTTAAATACGGATGGACTGAACCATGCTCAATATACCATCGAACTCGCACGTCTCGGGGATCCTACCCATTTA
GCGTTACTCCGTGAAGTAGCTAGTGCGGAAGGGGATTCTCGTTACCCGGATCGCCAATATGATGCGAAATTGGCG
AAACGTGTCTTGGCTGAGATTGAAGGTGCGGCGACCGCGCCTGCGAAACCTTCTACTCCTTCAGCGCCAACGGAA
CCAGCACCGGAAGCACCTACTCCACCGGTGAAAGCGGCTTGTGCACTCAGCGCCGCGGGCTGTGTAGTAGCGGGG
AGCACTTCAGGTGGTGGTTGTGCGTTATCGACAGATGGTACGGGGAAATGTGTGGTCACTGCGGCCACTGATGGT
GGCGCGGCAGGCTCATAATAGTGATAATAG
Sequence Id2
  (SEQ ID NO: 148)
MHHHHHHSSGVDLGTENLYFQSMRGGRLCYCRRRFCVCVGRGASKPWLFTVHGTGQPDPLGPGLPADTARDVLDI
YRWQPIGNYPAAAFPMWPSVEKGVAELILQIELKLDADPYADFAMAGYSQGAIVVGQVLKHHILPPTGRLHRELH
RLKKVIFWGNPMRQKGFAHSDEWIHPVAAPDTLGILEDRLENLEQYGFEVRDYAHDGDMYASIKEDDLHEYEVAI
GRIVMKASGFIGGRDSVVAQLIELGQRPITEGIALAGAIIDALTFFARSRMGDKWPHLYNRYPAVEFLRQIAGPA
VPPPGSSFTRFLQDDPLLTREQVMAELIRVADDELNMPDKRGACVIAGMTISQEVGVKDNDPPFERREWCPANRA
DPESFNYPHDSESNDGRSVGYFQQQKGPNGELWWGTTASEMNLHSAATQFMTRLKAAGYNASNAQAANDSAQAIQ
RSGVPQAYKQWWDDINRLYDKVKGSGGGPAPAPKPPQSGPWTGDPVWLADVLRAEGLNVVELPGWLDRGHGDMGR
LWGVVCHHTGSDNTPSSEIAFHPSLGLCSQIHLARNGTVTLCGVGIAWHAGVGSYPGLPEDNANAVTIGIEAQNS
GTYDGAPHRTNWPDAQYDAYVKCCAAICRRLGVRADHVISHKEWAGRKQGKWDPGAIDMNIFRADVQRRIDAHQP
NGEDDFMAALSADEQREVLNLLRVLADRRFVSRSPFRHLGEGPSETVAGFGLNTDGLNHAQYTIELARLGDPTHL
ALLREVASAEGDSRYPDRQYDAKLAKRVLAEIEGAATAPAKPSTPSAPTEPAPEAPTPPVKAACALSAAGCVVAG
STSGGGCALSTDGTGKCVVTAATDGGAAGS
Sequence Id3 (1B7)
  (SEQ ID NO: 149)
ATGCACCATCATCATCATCATTCTTCTGGTGTAGATCTGGGTACCGAGAACCTGTACTTCCAATCCATGAAACGC
AAGAAACGTAAGAAACGCAAAGGTGCATTGAACGGTGAATTTTACGTTCCGGCAGGGACAATCATTACTGCCAAC
GGGACAGGGGTTCCAGATGGTGCGGGGCCCGGATTTGGTGCCGATCTGGCTCGCGAACTGGAGCGTGTGGCTGAA
GGCATGTGGATTTGGAAATGGATCAACTACCCAGCAGCAGTAATGCCGATGCGTCCGAGCATTAATACGTTGCGT
TTGGCTTTAAAAGAGATGATCCGTACCACTCCGGGCAAAATTGTTTTATCGGCGTACTCTCAATCGGCCGTGGCT
TTTGCTTACGTATGGCGCGACGACATTCTTAACCCCGATGGTGAACTTCACGACCGCCTGGATGATATTGTAGCA
GTAATCTTGTACGGCAACCCAGTTCGCGCCCCTGGGATTGCTTATGGCAACGAGTTAGGCGGTCAATCTGCCCCC
GGCAAGCTGAATGGGCATGTCACCGGCGGCATCGCCGGGCCTGATTGTTTGCGCCCGGAAGAGTGCGTCCATCCC
GTCACTGGGCGTCGCATTGTACTGGACTTCGCTAATGCCGGTGATTTGTACGCTGCTGCACCCGTTGGCGCGGAA
CCCTGGGTCAAAGAGACTGAGGTAGGCCATAACGAGACGCTTATTTACGAAGCTGTTATGGATTTTAATGGCCGC
GATATCCTTGCATTCGCCAAAGAGATCGCACAGATTCTTACAATGCCCTTGAGCCAGGTCGTACCGCTGGTACAA
GCAATTATCAACGGGTTAAGCTTTCTTGTCCAGGGCCCGAAAGCTCCGCACTGGACGTACACGATTGGCCCGGCA
GTCGATTACTTAGTCCGCACGGGCAATGAACTTCGTAAAAATGCAGGTCCGGCGGTTCCGCCGCCGGGAAGCACT
ACAAAGGACCAGGTAGCGCAGATTACAATTGCAGAGGCAAAAGCCCGTGGGTATACTCGTTCAGAGTGTTTAGCC
ATTATGTCTACGTTTTATCAGGAAAGCGGTTGGAATGATACTATTTGGGATCCTACGCATACAACGTATGGAATC
GCGCAACAAGATGGTAGTTATCCCCATCGTTTTGATGGCGCGGCCGCGCAGATTAAGGGTTTCTTTGATAAACTG
GATGTTTGGCGTGCAAAGCCGGGCGCATCGACAGACATTTGGCTTAATATTTGTTGGATGCAACAAGCGCCGAAT
TGGCCGTCGGCCGATTATTGGTATGCGAATGGTCGTCGTGCTTATCTGACAGAGATTAAAAGTCGTATTGCGACG
GTTACGCCGTATCTGGATAAATATTGGCCTGCTGACGGCGGCACGGCGGTTCCAGATGAGCCTCGTCCGGACTTT
AATGAGTTCCCAATTTGGTCAAATAATAATTCGGCGCGTTCAGGTAAACCGACTATGTTTCTGATTCATACGCAG
GAAGGCGGTGGTGGTGATGCCGCAGCTGAAAATTTGGCCAAATGGTTTCAAAATGGTAATGGAGTGTCCTATCAT
TATACCATTAGCCAGGCAAGCGACGGCGGCGTAACCGTAGTGGACTGTGTAGATACGGATCGTGCGGCGTGGAGC
GTCGGAAATGCTAATAGTATTAGTATTAATTTGTGTTTTGCTGGATCACGCGCGAGCTGGATGCGCGACCAATGG
ATGAAACAATCGAATGCTATTGATGTTGCCGCGTATCTGGCTGTTCAAGATGCCAAGAAATATGGTTTTACGCCC
TTGGTCGTACCGCCGCCGTACACCAACGGCCGTCCGGGGATTAGCGATCATCGCTGGGTTACTGATGTATTTAAA
TGGGGTACCCATACGGATGTTGGTGATTGGTTTCCTTGGGATTATTTTGCGGAGCGCGTTAATCATTGGGCAAAT
GGCGGTAAAACGGAACCGGAGCCACCTAAAGTTAAGCGTTTTCCTGATGATTGGAGCGATCGTGAGATTCTGGTT
GAAATTCTTCGCCAGTTACGTGGGTATAATTTGACCGGGTGGCCACAATTGGGTGGCAAGACACTGGTAGATGCT
GTGGCGGAGTTGCTGGGACATGGCTCATAATAGTGATAATAG
Sequence Id4
  (SEQ ID NO: 150)
MHHHHHHSSGVDLGTENLYFQSMKRKKRKKRKGALNGEFYVPAGTIITANGTGVPDGAGPGFGADLARELERVAE
GMWIWKWINYPAAVMPMRPSINTLRLALKEMIRTTPGKIVLSAYSQSAVAFAYVWRDDILNPDGELHDRLDDIVA
VILYGNPVRAPGIAYGNELGGQSAPGKLNGHVTGGIAGPDCLRPEECVHPVTGRRIVLDFANAGDLYAAAPVGAE
PWVKETEVGHNETLIYEAVMDENGRDILAFAKEIAQILTMPLSQVVPLVQAIINGLSFLVQGPKAPHWTYTIGPA
VDYLVRTGNELRKNAGPAVPPPGSTTKDQVAQITIAEAKARGYTRSECLAIMSTFYQESGWNDTIWDPTHTTYGI
AQQDGSYPHRFDGAAAQIKGFFDKLDVWRAKPGASTDIWLNICWMQQAPNWPSADYWYANGRRAYLTEIKSRIAT
VTPYLDKYWPADGGTAVPDEPRPDFNEFPIWSNNNSARSGKPTMFLIHTQEGGGGDAAAENLAKWFQNGNGVSYH
YTISQASDGGVTVVDCVDTDRAAWSVGNANSISINLCFAGSRASWMRDQWMKQSNAIDVAAYLAVODAKKYGFTP
LVVPPPYTNGRPGISDHRWVTDVFKWGTHTDVGDWFPWDYFAERVNHWANGGKTEPEPPKVKRFPDDWSDREILV
EILRQLRGYNLTGWPQLGGKTLVDAVAELLGHGS
Sequence Id5 (1B11)
  (SEQ ID NO: 151)
ATGCACCATCATCATCATCATTCTTCTGGTGTAGATCTGGGTACCGAGAACCTGTACTTCCAATCCATGAAACGC
AAGAAACGTAAGAAACGCAAAGGTGCACGTATCGACGGCCAATATGTTGGATTAGGACCAGGGGATCGTTCGGAC
GAGATCCGCAAGATCAAAGCGTTCATGCGTCGCAAGTTCTCCTACGCAGCGACGCTGGCCGACACTGAGTTCTAC
GACGAGGCCATGACCGCTGTAGTCGCCGAGATGCAATCCCGTTACAACACTGCTGGTCAGCTCCGCGACGGGTTG
TACATCCCCGGGATTATCAACGCTGAAACCAAGTACGTTATGGGATATTTGTCACGTCCAGTAATCGACACACGT
CCAGTCCTGTTTACCGTATGCGGAACCGGCGTGCCTTGGTGGGTCGGCCCAGACGCCGACACCGCTCGCGCTGTT
GAGGACCAATATTTATGGCAACCGATTGGTTATCCGGCCGCGCCCTTCCCAATGGGTCGTTCCATCACCGCGGGG
ATCACTGAGGCACACAACCAGGCGAACCGCTGGCGCGAACGTATCGAAACTCACGGCACCGCCCTCGCAGGTTAT
TCTCAAGGCGCAGTCGTTCTTTCTGAGTTATGGATGAACCACATCGCACCGGAAGACGGCTCGCTTCGCTGGATG
AAACCACATGTACGTAAAGCAGTGACGTGGGGCAACCCGAACCGCGAATTAGGCCACGTGTGGGCCGATCACGGC
GGCTCTCCTATGGCGCCAAGTAACACTCAGGGCGTGTCGTCAAACGGAATGCGCAACACGCCTGACTGGTGGCGC
GACTACGCCCACCAAGGCGACCTGTACGCTTGCACCGAACCGGGAGACACCCAAGAGGTTCGCAACGCGATCTGG
CAGATCGTCCGCGACCTGGACCTGTTCACCGGACCAGATTCACTCCTTGCCCAAGTGATCGAACTGGCCCAAGCC
CCTCTCCCTGAGACGATCGCGATCACTCGCGCGATCCTGGACGCGGGTATGTTCTTCGCGAAACGCACAGGCCCA
CACGTAGACTACAACCCGCAGCCAGCGATCGACTATCTCCGCACGGCAGGTGCGGGTGCGGGTGCGGGTGGAAGC
ACAGAGCGTGTCCTGCCGTATGATCGTAATATTGTACCACAAGAAACGGGTTGGTGGTGCGGTCCGGCAGCGACG
CAAGTTGTTCTGAATAGTCGTGGAATTATTGTACCGGAAGCGACCCTGGCAAATGAAATTGAACAAATTGAAAAT
CCAGGTCGCGGTGACGATCGTGATGGAACGGATTATGTGGGGCTTATTGAACAAGTGCTTGATCGCCGTGTGCCC
GAAGCGAAATATACGAGCGTGTATATGCCTAATGATCCGCCCACCGCAGCCCAACGCGAAGCTTTATGGCAAAAT
ATTGTGCGCTCCATTAATGCGGGCTGGGGTGTCATTATGAATTGGGTGGCGCCGCCATCCAATAAACCACGCGGA
GTCAAAGGTAGCCCCAATCCTAAATATTCAGGTGGTACAACTTATCATTATGTGGCCTGTATGGGTTATGATGAT
ACTCCGGGCGCCCGCGCCTTGTGGATTGCGGATTCTGGGTTTCAACCCTTTAATTATTGGATTTCGTTTGATCAA
GCAGCAACGCTCATTCCACCTAAAGGGTATGCGTATGCCGCGACGACGGCTACAGCTCCTGCGCCGGCTCCAGCC
CCTGTTGATGCGGCACCCATTTTAGCACGCGCAGCTGGGATTAGCGAAGCTAAAGCACGTGAAATCTTACCCACC
TTTCGTGATGGTTTGCGCTTAGCTGAATGTAATAATGTTCCGCGCATTGCAATGTTTATTGCACAAACAGGCCAC
GAAAGCGATAATTTTAATGCCACTCAAGAATATGATCATGGCCGTAATTATGGCGATCCAAATGAAGCAACCGAT
CGTTGGAAATATAAAGGGCGTACGTGGATCCAAATTACATGGCGTGGTAATTATGAGCGTTTCTCACGTTGGTGT
TTTGATCGTAAATTGGTGCCTACCCCAACATATTTTGTAGATAATCCACGCGCACTCGCGGATGTTCGTTGGGCA
GGAATTGGCGCGGCGTGGTATTGGACGGTAGAACGTCCTTCCATTAATCGCCTGTGTGATGAGCGTAATTTAACG
GAAGTTACTCGTCTGATTAATGGTGGCACATCGTGGGAAGCCCCAACCTGGATGAAACATCGTAAAGAACGTTAT
GATCGTGCGTTAGCTGTGGGTAATGATCTTTTAAAGCTGTTAGATGGCGAAGAAGAAGGGTTTCTGTCGGCGCTT
ACGCCGAAAGAGCAACGTGAACTTTATGATGAAATTATGAAACGTGGGCCTAGCCGTAGCTTTCTTGCGGATGAT
GGTCGTCAAATCGAAACGCTGCTCGGTTTTATTTATAATATTGATGGAAATGCGTGGAATATTGTGAATATTCTT
GGTTGTTTGATTGGTGTACCAGAGTGTGTCGATGATATTCGTGACGTTGCCGAAAATGGAGTACGTAAAGGTTCA
TATGCAGAAAGTAATCCCTGGCTCGCGCAATTTGGTCAAGAATTTTGTAAACGTTTGCTTCCCCTTGCTGGTAAA
CTGTCTGAACTCTTGAATGCACAAGAATTTAAGGTTACACATAATCGCATTATTGAACAAGGCTCATAATAGTGA
TAATAG
Sequence Id6
  (SEQ ID NO: 152)
MHHHHHHSSGVDLGTENLYFQSMKRKKRKKRKGARIDGQYVGLGPGDRSDEIRKIKAFMRRKFSYAATLADTEFY
DEAMTAVVAEMQSRYNTAGQLRDGLYIPGIINAETKYVMGYLSRPVIDTRPVLFTVCGTGVPWWVGPDADTARAV
EDQYLWQPIGYPAAPFPMGRSITAGITEAHNQANRWRERIETHGTALAGYSQGAVVLSELWMNHIAPEDGSLRWM
KPHVRKAVTWGNPNRELGHVWADHGGSPMAPSNTQGVSSNGMRNTPDWWRDYAHQGDLYACTEPGDTQEVRNAIW
QIVRDLDLFTGPDSLLAQVIELAQAPLPETIAITRAILDAGMFFAKRTGPHVDYNPQPAIDYLRTAGAGAGAGGS
TERVLPYDRNIVPQETGWWCGPAATQVVLNSRGIIVPEATLANEIEQIENPGRGDDRDGTDYVGLIEQVLDRRVP
EAKYTSVYMPNDPPTAAQREALWQNIVRSINAGWGVIMNWVAPPSNKPRGVKGSPNPKYSGGTTYHYVACMGYDD
TPGARALWIADSGFQPFNYWISFDQAATLIPPKGYAYAATTATAPAPAPAPVDAAPILARAAGISEAKAREILPT
FRDGLRLAECNNVPRIAMFIAQTGHESDNFNATQEYDHGRNYGDPNEATDRWKYKGRTWIQITWRGNYERFSRWC
FDRKLVPTPTYFVDNPRALADVRWAGIGAAWYWTVERPSINRLCDERNLTEVTRLINGGTSWEAPTWMKHRKERY
DRALAVGNDLLKLLDGEEEGFLSALTPKEQRELYDEIMKRGPSRSFLADDGRQIETLLGFIYNIDGNAWNIVNIL
GCLIGVPECVDDIRDVAENGVRKGSYAESNPWLAQFGQEFCKRLLPLAGKLSELLNAQEFKVTHNRIIEQGS
Sequence Id7 (1C9)
  (SEQ ID NO: 153)
ATGCACCATCATCATCATCATTCTTCTGGTGTAGATCTGGGTACCGAGAACCTGTACTTCCAATCCATGTTCTTC
CATCATATTTTCCGCGGCAAAGTCCATGTGGGCAAGACCATTCATCGCTTAGTAACGGGTGGTGCTTCTAAGCCT
GTGCTGTTGACTGCTAGTGGGACGGGTGCGGATATGTGGTCTGGATATCCGGCGGATCTTGCGCGTCGCGTCGAG
GACCTTTACTACTTTCAGCCAATCTACTATGGTCCAGGTGGGATTCCGGCGACGGTACCAATGGGGGCGAGCGCA
CAGTCTGGCGTAGATATGGGAGTACGTCTGGTACTGGAGTGCGAGGCTCGTCCGTCGCGCGACGTCCCTGATGGG
TATGCCTTGTGTGGCTACTCTCAAGGGGGCATGGTTGTATCCGCGTTGTTGGACGAGTTTCGCACGGGCCGCCTT
CGCCACTTGAATGGCAAATTGATGGCGGGCAGCACCTTTGGAAACCCGTGGCGCGAGCTTGATTCTAACGGCGGG
CGCGGCATCAGCGACCGTCGCATTGTGGGGACCCCCGACTTCTGGGTGGATGAGTTCGACCCAGGAGACATTTAT
GCAAACGTGCCTAACAATGATGTCGGGGATGATATGACTGCCATTTTTAAGCTGGTACAGCTGCGCTCACTGGCT
GACCTGATCGGTATTGGATCGATTATGGATCGCGTAATGGACGTTCTTCGCGGCCCATTGAGCGGGATGCGCTCC
GTAGTTGAGGCGATTGTTCGTGGCTTATTATTTTTCGGCCGTAAGCCGCCAACAGCGCCCCATACAGAGTACCAT
TTGCGCGAGGTCCGTCCGGGAGTGACGTATTTTGAACATGCAGTCGCCCACATGCGCGCTATGGCCGCCGCAGGT
ATCCCGCAGGGTCGTTCTCACCCGGTTCAGCCGTACCCGGGTGCGTTCGGAAGCCCTGTCTATGCGATTCAGTCT
GGAACTGTTATTTACGCCGGTGCCGCATCGGGATATGGTGGTCCTGACCCTGCAGGCTGGCTTGTTATTGATTCT
GATGATGCCGAGGGTGGCGGCTGTTTAGAGTATGGTCATATTGTCCGTGAGGTAAATCGTGGTGATCATGTGACG
GCGGGTCAACGTATTGGACATATTAATCCAAATAATCGTACGAATGGTGGAGTGGCCCCGCATCTTCATGTAACT
GACTGGCCACATGCGTATGGGCAAGGCAGCCGTCAAAATGTGATGGCACGCTTGAGTGGAGCCCGCGAGCCAGAA
GCCCAAGCGGCCCCAACCCCCACAGAGCAAGGCACTGTTGTTGGTGACCCGGTTTGGTTGGCGGATGTAGTGCGC
CCAACTGTAGCTAAATTTGCGGAGTATCCTGGCTGGCGTAATCGTGGTCACGGTGATTTTAAGGATATCCGTGGA
GTTATGGTTCATCATACAGGTGGGCCCGCCTCTGCAGCCTCAATTGCGAATGGCCGCCCAGACCTTGCCGGCCCT
CTTGCACAGCTGCATATTTCGCGTGATGGGACAGTTACTGTCGTAGCTGTAGGAGTGGCTTGGCATGCGGGTGCA
GGCAGCTATCCATGGTTACCGACCAACATGGGTAATTGGCACTTGATTGGTATTGAATGTGAGTGGCCATATGGT
GAGCCGGGAATTAATGAGCGTAATGCCTATACAGTACGCTGGCGTGATCCAGAGATTATTGCGCTGCGTAATACA
TGTGCGGCAATTTTACTGCGCCTTGGCCTCGGGGTAGATCGCCTGATTGGCCATAAGGATTATGCCGGCCGTGCT
CAAGGCAAGTGGGACCCGGGAAATATGAGCATGGACTGGCTGCGTGGCGAGGTGCGTAAAGATATGGATGGCTTT
GTATTTCCCGGTGAGGATATTGTAAATGTGACCCCGCCACCAGTCCCGGCCCCTGTCCCTGCCCCGCCAGCGACT
GCGAATGTTCTTCTCCATCGTGGTATGAGTGGACCTAATGTTGTCAAATTACAGACAACTCTCCGTCGTTGGTAT
TCAAAACTGGCGGTAGACGGTGATTTTGGCCCCCATACAGAGGCATGTGTACGCGATCGCCAACGCATTTATGGG
TTGGACGTGGATGGTATTGTCGGACCATTAACTGCGGCCAAAATCGGCCTGGTTTTGGGCTCATAATAGTGATAA
TAG
Sequence Id8
  (SEQ ID NO: 154)
MHHHHHHSSGVDLGTENLYFQSMFFHHIFRGKVHVGKTIHRLVTGGASKPVLLTASGTGADMWSGYPADLARRVE
DLYYFQPIYYGPGGIPATVPMGASAQSGVDMGVRLVLECEARPSRDVPDGYALCGYSQGGMVVSALLDEFRTGRL
RHLNGKLMAGSTFGNPWRELDSNGGRGISDRRIVGTPDFWVDEFDPGDIYANVPNNDVGDDMTAIFKLVQLRSLA
DLIGIGSIMDRVMDVLRGPLSGMRSVVEAIVRGLLFFGRKPPTAPHTEYHLREVRPGVTYFEHAVAHMRAMAAAG
IPQGRSHPVQPYPGAFGSPVYAIQSGTVIYAGAASGYGGPDPAGWLVIDSDDAEGGGCLEYGHIVREVNRGDHVT
AGQRIGHINPNNRTNGGVAPHLHVTDWPHAYGQGSRQNVMARLSGAREPEAQAAPTPTEQGTVVGDPVWLADVVR
PTVAKFAEYPGWRNRGHGDFKDIRGVMVHHTGGPASAASIANGRPDLAGPLAQLHISRDGTVTVVAVGVAWHAGA
GSYPWLPTNMGNWHLIGIECEWPYGEPGINERNAYTVRWRDPEIIALRNTCAAILLRLGLGVDRLIGHKDYAGRA
QGKWDPGNMSMDWLRGEVRKDMDGFVFPGEDIVNVTPPPVPAPVPAPPATANVLLHRGMSGPNVVKLOTTLRRWY
SKLAVDGDFGPHTEACVRDRQRIYGLDVDGIVGPLTAAKIGLVLGS
Sequence Id9 (1E10)
  (SEQ ID NO: 155)
ATGCACCATCATCATCATCATTCTTCTGGTGTAGATCTGGGTACCGAGAACCTGTACTTCCAATCCATGTGGCGC
TCCCTGGGTCGTACGCTGTTACGTCTGTCCCATGCTCTGAAACCGCTGGCGCGCCGTTCCGGGTGGGGTGCTAGT
AAACCGTGGTTATTTACTGTGCATGGAACCGGACAACCCGATCCTCTTGGTCCCGGGCTCCCGGCAGACACAGCT
CGTGATGTTTTGGATATTTATCGTTGGCAACCAATTGGTAATTATCCAGCCGCCGCATTTCCCATGTGGCCCAGC
GTGGAGAAAGGGGTTGCCGAATTAATTCTCCAAATTGAACTTAAATTGGATGCGGACCCATATGCCGATTTTGCC
TTGGCGGGTTATTCTCAAGGTGCGATTGTTGTAGGACAAGTTCTGAAACATCATATTATTAATCCTCGCGGACGT
TTGCATCGTTTTCTTCATCGTCTGCGCAAAGTAATTTTCTGGGGCAACCCCATGCGTCAGAAAGGTTTCGCGCAT
ACTGATGAATGGATCCATCAAGTGGCCGCAAGTGATACTATGGGTATTCTGGAAGATCGTTTGGAAAATCTTGAA
CAGTATGGTTTCGAAGTTCGTGATTATGCGCATGATGGTGATATGTACGCGAGTATTAAAGAAGATGATATGCAT
GAATATGAAGTTGCGATCGGTCGTATTGTTATGTCTGCGCGTCGCTTTATTGGCGGAAAAGATTCAGTAATTGCG
CAACTGATTGAACTGGGCCAACGCCCAATTTGGGAAGGCATTGCAATGGCTCGCGCTATTATTGATGCGCTTACC
TTCTTCGCGAAATCTACACAGGGGCCTTCGTGGCCTCACCTTTATAATCGTTTTCCAGCCGTAGAATTTCTGCGT
CGCATTGCAGGTGCGGGTGCGGGTGCGGGTGGAAGCTCATTTACGCGCTTTCTCCAAGACGATCCCTTGCTGACT
CGTGAACAGGTAATGGCAGAACTCATCCGCGTTGCTGATGAATTGAATATGCCTGATAAACGTGGAGCATGTGTG
ATCGCAGGAATGACTATCTCACAGGAAGTTGGTGTGAAAGATAATGATCCCCCATTTGAACGCCGTTTCTGGTGT
CCAGCAAATCGTGCGGATCCAGAGTCTTTTAATTATCCACATGATAGTGAGTCCAATGATGGACGTTCAGTGGGG
TATTTTCAACAACAAAAGGGCCCAAATGGTGAACTTTGGTGGGGCACTACCGCGAGTGAAATGAATTTACATAGT
GCAGCCACCCAATTCATGACTCGTTTAAAAGCCGCGGGTTATAATGCCTCTAATGCGCAAGCCGCAAATGATTCT
GCTCAAGCTATTCAACGTTCAGGTGTTCCACAAGCCTATAAACAGTGGTGGGATGATATCAATCGTTTATATGAT
AAAGTAAAAGGTAGCGGCGGCGGACCCGCACCGGCTCCCAAACCACCTCAAAGCGGTCCTTGGACTGGTGATCCT
GTTTGGTTAGCAGATGTATTACGTGCAGAAGGCTTGAATGTTGTTGAACTCCCTGGTTGGTTAGATCGTGGTCAT
GGAGATATGGGTCGTCTGTGGGGCGTCGTATGTCACCATACTGGTAGTGACAATACTCCAAGCTCTGAAATCGCA
TTCCATCCCAGCCTGGGTCTTTGTTCCCAAATCCATCTTGCCCGTAATGGTACGGTTACACTTTGTGGCGTTGGT
ATTGCGTGGCACGCAGGAGTGGGATCGTACCCGGGGTTGCCGGAAGATAATGCAAATGCCGTGACAATTGGTATT
GAAGCACAAAATTCGGGTACATACGATGGTGCTCCTCATCGCACCAACTGGCCGGATGCACAGTATGATGCGTAC
GTCAAATGTTGTGCGGCTATTTGTCGTCGTCTGGGAGTCCGTGCAGACCATGTAATTTCGCATAAAGAGTGGGCG
GGCCGTAAACAGGGTAAGTGGGACCCGGGAGCGATTGATATGAATATTTTCCGTGCGGATGTTCAACGTCGTATT
GATGCGCACCAGCCGAATGGTGAAGATGACTTTATGGCGGCTCTGAGCGCGGATGAACAACGTGAAGTTTTGAAT
CTTTTGCGTGTTTTAGCGGATCGCCGCTTTGTGAGTCGTTCACCTTTTCGTCATCTCGGTGAAGGTCCATCCGAG
ACGGTAGCGGGCTTTGGTTTAAATACGGATGGACTGAACCATGCTCAATATACCATCGAACTCGCACGTCTCGGG
GATCCTACCCATTTAGCGTTACTCCGTGAAGTAGCTAGTGCGGAAGGGGATTCTCGTTACCCGGATCGCCAATAT
GATGCGAAATTGGCGAAACGTGTCTTGGCTGAGATTGAAGGTGCGGCGACCGCGCCTGCGAAACCTTCTACTCCT
TCAGCGCCAACGGAACCAGCACCGGAAGCACCTACTCCACCGGTGAAAGCGGCTTGTGCACTCAGCGCCGCGGGC
TGTGTAGTAGCGGGGAGCACTTCAGGTGGTGGTTGTGCGTTATCGACAGATGGTACGGGGAAATGTGTGGTCACT
GCGGCCACTGATGGTGGCGCGGCAGGCTCATAATAGTGATAATAG
Sequence Id10
  (SEQ ID NO: 156)
MHHHHHHSSGVDLGTENLYFQSMWRSLGRTLLRLSHALKPLARRSGWGASKPWLFTVHGTGQPDPLGPGLPADTA
RDVLDIYRWQPIGNYPAAAFPMWPSVEKGVAELILQIELKLDADPYADFALAGYSQGAIVVGQVLKHHIINPRGR
LHRFLHRLRKVIFWGNPMRQKGFAHTDEWIHQVAASDTMGILEDRLENLEQYGFEVRDYAHDGDMYASIKEDDMH
EYEVAIGRIVMSARRFIGGKDSVIAQLIELGQRPIWEGIAMARAIIDALTFFAKSTQGPSWPHLYNRFPAVEFLR
RIAGAGAGAGGSSFTRFLQDDPLLTREQVMAELIRVADELNMPDKRGACVIAGMTISQEVGVKDNDPPFERREWC
PANRADPESFNYPHDSESNDGRSVGYFQQQKGPNGELWWGTTASEMNLHSAATQFMTRLKAAGYNASNAQAANDS
AQAIQRSGVPQAYKQWWDDINRLYDKVKGSGGGPAPAPKPPQSGPWTGDPVWLADVLRAEGLNVVELPGWLDRGH
GDMGRLWGVVCHHTGSDNTPSSEIAFHPSLGLCSQIHLARNGTVTLCGVGIAWHAGVGSYPGLPEDNANAVTIGI
EAQNSGTYDGAPHRTNWPDAQYDAYVKCCAAICRRLGVRADHVISHKEWAGRKQGKWDPGAIDMNIFRADVQRRI
DAHQPNGEDDFMAALSADEQREVLNLLRVLADRRFVSRSPFRHLGEGPSETVAGFGLNTDGLNHAQYTIELARLG
DPTHLALLREVASAEGDSRYPDRQYDAKLAKRVLAEIEGAATAPAKPSTPSAPTEPAPEAPTPPVKAACALSAAG
CVVAGSTSGGGCALSTDGTGKCVVTAATDGGAAGS
Sequence Id11 (1G8)
  (SEQ ID NO: 157)
ATGCACCATCATCATCATCATTCTTCTGGTGTAGATCTGGGTACCGAGAACCTGTACTTCCAATCCATGGGCATT
GGTAAGTTCCTGAAAAAAGCGAAGAAATTTGGTGCTAGTAAACCGTGGTTATTTACTGTGCATGGAACCGGACAA
CCCGATCCTCTTGGTCCCGGGCTCCCGGCAGACACAGCTCGTGATGTTTTGGATATTTATCGTTGGCAACCAATT
GGTAATTATCCAGCCGCCGCATTTCCCATGTGGCCCAGCGTGGAGAAAGGGGTTGCCGAATTAATTCTCCAAATT
GAACTTAAATTGGATGCGGACCCATATGCCGATTTTGCCTTGGCGGGTTATTCTCAAGGTGCGATTGTTGTAGGA
CAAGTTCTGAAACATCATATTATTAATCCTCGCGGACGTTTGCATCGTTTTCTTCATCGTCTGCGCAAAGTAATT
TTCTGGGGCAACCCCATGCGTCAGAAAGGTTTCGCGCATACTGATGAATGGATCCATCAAGTGGCCGCAAGTGAT
ACTATGGGTATTCTGGAAGATCGTTTGGAAAATCTTGAACAGTATGGTTTCGAAGTTCGTGATTATGCGCATGAT
GGTGATATGTACGCGAGTATTAAAGAAGATGATATGCATGAATATGAAGTTGCGATCGGTCGTATTGTTATGTCT
GCGCGTCGCTTTATTGGCGGAAAAGATTCAGTAATTGCGCAACTGATTGAACTGGGCCAACGCCCAATTTGGGAA
GGCATTGCAATGGCTCGCGCTATTATTGATGCGCTTACCTTCTTCGCGAAATCTACACAGGGGCCTTCGTGGCCT
CACCTTTATAATCGTTTTCCAGCCGTAGAATTTCTGCGTCGCATTGCAGGTTTAAGCCGCTTCTTCCATGCCGAG
TTGGGAAGCCCTGTCTATGCGATTCAGTCTGGAACTGTTATTTACGCCGGTGCCGCATCGGGATATGGTGGTCCT
GACCCTGCAGGCTGGCTTGTTATTGATTCTGATGATGCCGAGGGTGGCGGCTGTTTAGAGTATGGTCATATTGTC
CGTGAGGTAAATCGTGGTGATCATGTGACGGCGGGTCAACGTATTGGACATATTAATCCAAATAATCGTACGAAT
GGTGGAGTGGCCCCGCATCTTCATGTAACTGACTGGCCACATGCGTATGGGCAAGGCAGCCGTCAAAATGTGATG
GCACGCTTGAGTGGAGCCCGCGAGCCAGAAGCCCAAGCGGCCCCAACCCCCACAGAGCAAGGCACTGTTGTTGGT
GACCCGGTTTGGTTGGCGGATGTAGTGCGCCCAACTGTAGCTAAATTTGCGGAGTATCCTGGCTGGCGTAATCGT
GGTCACGGTGATTTTAAGGATATCCGTGGAGTTATGGTTCATCATACAGGTGGGCCCGCCTCTGCAGCCTCAATT
GCGAATGGCCGCCCAGACCTTGCCGGCCCTCTTGCACAGCTGCATATTTCGCGTGATGGGACAGTTACTGTCGTA
GCTGTAGGAGTGGCTTGGCATGCGGGTGCAGGCAGCTATCCATGGTTACCGACCAACATGGGTAATTGGCACTTG
ATTGGTATTGAATGTGAGTGGCCATATGGTGAGCCGGGAATTAATGAGCGTAATGCCTATACAGTACGCTGGCGT
GATCCAGAGATTATTGCGCTGCGTAATACATGTGCGGCAATTTTACTGCGCCTTGGCCTCGGGGTAGATCGCCTG
ATTGGCCATAAGGATTATGCCGGCCGTGCTCAAGGCAAGTGGGACCCGGGAAATATGAGCATGGACTGGCTGCGT
GGCGAGGTGCGTAAAGATATGGATGGCTTTGTATTTCCCGGTGAGGATATTGTAAATGTGACCCCGCCACCAGTC
CCGGCCCCTGTCCCTGCCCCGCCAGCGACTGCGAATGTTCTTCTCCATCGTGGTATGAGTGGACCTAATGTTGTC
AAATTACAGACAACTCTCCGTCGTTGGTATTCAAAACTGGCGGTAGACGGTGATTTTGGCCCCCATACAGAGGCA
TGTGTACGCGATCGCCAACGCATTTATGGGTTGGACGTGGATGGTATTGTCGGACCATTAACTGCGGCCAAAATC
GGCCTGGTTTTGGGCTCATAATAGTGATAATAG
Sequence Id12
  (SEQ ID NO: 158)
MHHHHHHSSGVDLGTENLYFQSMGIGKFLKKAKKFGASKPWLFTVHGTGQPDPLGPGLPADTARDVLDIYRWQPI
GNYPAAAFPMWPSVEKGVAELILQIELKLDADPYADFALAGYSQGAIVVGQVLKHHIINPRGRLHRFLHRLRKVI
FWGNPMRQKGFAHTDEWIHQVAASDTMGILEDRLENLEQYGFEVRDYAHDGDMYASIKEDDMHEYEVAIGRIVMS
ARRFIGGKDSVIAQLIELGQRPIWEGIAMARAIIDALTFFAKSTQGPSWPHLYNRFPAVEFLRRIAGLSRFFHAE
LGSPVYAIQSGTVIYAGAASGYGGPDPAGWLVIDSDDAEGGGCLEYGHIVREVNRGDHVTAGQRIGHINPNNRTN
GGVAPHLHVTDWPHAYGQGSRQNVMARLSGAREPEAQAAPTPTEQGTVVGDPVWLADVVRPTVAKFAEYPGWRNR
GHGDFKDIRGVMVHHTGGPASAASIANGRPDLAGPLAQLHISRDGTVTVVAVGVAWHAGAGSYPWLPTNMGNWHL
IGIECEWPYGEPGINERNAYTVRWRDPEIIALRNTCAAILLRLGLGVDRLIGHKDYAGRAQGKWDPGNMSMDWLR
GEVRKDMDGFVFPGEDIVNVTPPPVPAPVPAPPATANVLLHRGMSGPNVVKLQTTLRRWYSKLAVDGDFGPHTEA
CVRDRQRIYGLDVDGIVGPLTAAKIGLVLGS
Sequence Id13 (1H4)
  (SEQ ID NO: 159)
ATGCACCATCATCATCATCATTCTTCTGGTGTAGATCTGGGTACCGAGAACCTGTACTTCCAATCCATGTTCTTC
CATCATATTTTCCGCGGCAAAGTCCATGTGGGCAAGACCATTCATCGCTTAGTAACGGGTGGTGCTTCTAAGCCT
GTGCTGTTGACTGCTAGTGGGACGGGTGCGGATATGTGGTCTGGATATCCGGCGGATCTTGCGCGTCGCGTCGAG
GACCTTTACTACTTTCAGCCAATCTACTATGGTCCAGGTGGGATTCCGGCGACGGTACCAATGGGGGCGAGCGCA
CAGTCTGGCGTAGATATGGGAGTACGTCTGGTACTGGAGTGCGAGGCTCGTCCGTCGCGCGACGTCCCTGATGGG
TATGCCTTGTGTGGCTACTCTCAAGGGGGCATGGTTGTATCCGCGTTGTTGGACGAGTTTCGCACGGGCCGCCTT
CGCCACTTGAATGGCAAATTGATGGCGGGCAGCACCTTTGGAAACCCGTGGCGCGAGCTTGATTCTAACGGCGGG
CGCGGCATCAGCGACCGTCGCATTGTGGGGACCCCCGACTTCTGGGTGGATGAGTTCGACCCAGGAGACATTTAT
GCAAACGTGCCTAACAATGATGTCGGGGATGATATGACTGCCATTTTTAAGCTGGTACAGCTGCGCTCACTGGCT
GACCTGATCGGTATTGGATCGATTATGGATCGCGTAATGGACGTTCTTCGCGGCCCATTGAGCGGGATGCGCTCC
GTAGTTGAGGCGATTGTTCGTGGCTTATTATTTTTCGGCCGTAAGCCGCCAACAGCGCCCCATACAGAGTACCAT
TTGCGCGAGGTCCGTCCGGGAGTGACGTATTTTGAACATGCAGTCGCCCACATGCGCGCTATGGCCGCCGCAGGT
CCAGCCGTTCCACCTCCGGGAAGCCCTGTCTATGCGATTCAGTCTGGAACTGTTATTTACGCCGGTGCCGCATCG
GGATATGGTGGTCCTGACCCTGCAGGCTGGCTTGTTATTGATTCTGATGATGCCGAGGGTGGCGGCTGTTTAGAG
TATGGTCATATTGTCCGTGAGGTAAATCGTGGTGATCATGTGACGGCGGGTCAACGTATTGGACATATTAATCCA
AATAATCGTACGAATGGTGGAGTGGCCCCGCATCTTCATGTAACTGACTGGCCACATGCGTATGGGCAAGGCAGC
CGTCAAAATGTGATGGCACGCTTGAGTGGAGCCCGCGAGCCAGAAGCCCAAGCGGCCCCAACCCCCACAGAGCAA
GGCACTGTTGTTGGTGACCCGGTTTGGTTGGCGGATGTAGTGCGCCCAACTGTAGCTAAATTTGCGGAGTATCCT
GGCTGGCGTAATCGTGGTCACGGTGATTTTAAGGATATCCGTGGAGTTATGGTTCATCATACAGGTGGGCCCGCC
TCTGCAGCCTCAATTGCGAATGGCCGCCCAGACCTTGCCGGCCCTCTTGCACAGCTGCATATTTCGCGTGATGGG
ACAGTTACTGTCGTAGCTGTAGGAGTGGCTTGGCATGCGGGTGCAGGCAGCTATCCATGGTTACCGACCAACATG
GGTAATTGGCACTTGATTGGTATTGAATGTGAGTGGCCATATGGTGAGCCGGGAATTAATGAGCGTAATGCCTAT
ACAGTACGCTGGCGTGATCCAGAGATTATTGCGCTGCGTAATACATGTGCGGCAATTTTACTGCGCCTTGGCCTC
GGGGTAGATCGCCTGATTGGCCATAAGGATTATGCCGGCCGTGCTCAAGGCAAGTGGGACCCGGGAAATATGAGC
ATGGACTGGCTGCGTGGCGAGGTGCGTAAAGATATGGATGGCTTTGTATTTCCCGGTGAGGATATTGTAAATGTG
ACCCCGCCACCAGTCCCGGCCCCTGTCCCTGCCCCGCCAGCGACTGCGAATGTTCTTCTCCATCGTGGTATGAGT
GGACCTAATGTTGTCAAATTACAGACAACTCTCCGTCGTTGGTATTCAAAACTGGCGGTAGACGGTGATTTTGGC
CCCCATACAGAGGCATGTGTACGCGATCGCCAACGCATTTATGGGTTGGACGTGGATGGTATTGTCGGACCATTA
ACTGCGGCCAAAATCGGCCTGGTTTTGGGCTCATAATAGTGATAATAG
Sequence Id14
  (SEQ ID NO: 160)
MHHHHHHSSGVDLGTENLYFQSMFFHHIFRGKVHVGKTIHRLVTGGASKPVLLTASGTGADMWSGYPADLARRVE
DLYYFQPIYYGPGGIPATVPMGASAQSGVDMGVRLVLECEARPSRDVPDGYALCGYSQGGMVVSALLDEFRTGRL
RHLNGKLMAGSTFGNPWRELDSNGGRGISDRRIVGTPDFWVDEFDPGDIYANVPNNDVGDDMTAIFKLVQLRSLA
DLIGIGSIMDRVMDVLRGPLSGMRSVVEAIVRGLLFFGRKPPTAPHTEYHLREVRPGVTYFEHAVAHMRAMAAAG
PAVPPPGSPVYAIQSGTVIYAGAASGYGGPDPAGWLVIDSDDAEGGGCLEYGHIVREVNRGDHVTAGQRIGHINP
NNRTNGGVAPHLHVTDWPHAYGQGSRQNVMARLSGAREPEAQAAPTPTEQGTVVGDPVWLADVVRPTVAKFAEYP
GWRNRGHGDFKDIRGVMVHHTGGPASAASIANGRPDLAGPLAQLHISRDGTVTVVAVGVAWHAGAGSYPWLPTNM
GNWHLIGIECEWPYGEPGINERNAYTVRWRDPEIIALRNTCAAILLRLGLGVDRLIGHKDYAGRAQGKWDPGNMS
MDWLRGEVRKDMDGFVFPGEDIVNVTPPPVPAPVPAPPATANVLLHRGMSGPNVVKLQTTLRRWYSKLAVDGDFG
PHTEACVRDRQRIYGLDVDGIVGPLTAAKIGLVLGS
Sequence 4D10
  (SEQ ID NO: 292)
WRSLGRTLLRLSHALKPLARRSGWMSKPWLFTVHGTGQPDPLGPGLPADTARDVLDIYRWQPIGNYPAAAFPMWP
SVEKGVAELILQIELKLDADPYADFAMAGYSQGAIVVGQVLKHHILPPTGRLHRFLHRLKKVIFWGNPMRQKGFA
HSDEWIHPVAAPDTLGILEDRLENLEQYGFEVRDYAHDGDMYASIKEDDLHEYEVAIGRIVMKASGFIGGRDSVV
AQLIELGQRPITEGIALAGAIIDALTFFARSRMGDKWPHLYNRYPAVEFLRQIAGAGAGMSFTRFLQDDPLLTRE
QVMAELIRVADELNMPDKRGACVIAGMTISQEVGVKDNDPPFERRFWCPANRADPESFNYPHDSESNDGRSVGYF
QQQKGPNGELWWGTTASEMNLHSAATQFMTRLKAAGYNASNAQAANDSAQAIQRSGVPQAYKQWWDDINRLYDKV
KGSGGGPAPAPKPPQSGPWTGDPVWLADVLRAEGLNVVELPGWLDRGHGDMGRLWGVVCHHTGSDNTPSSEIAFH
PSLGLCSQIHLARNGTVTLCGVGIAWHAGVGSYPGLPEDNANAVTIGIEAQNSGTYDGAPHRTNWPDAQYDAYVK
CCAAICRRLGVRADHVISHKEWAGRKQGKWDPGAIDMNIFRADVQRRIDAHQPNGEDDFMAALSADEQREVLNLL
RVLADRRFVSRSPFRHLGEGPSETVAGFGLNTDGLNHAQYTIELARLGDPTHLALLREVASAEGDSRYPDRQYDA
KLAKRVLAEIEGAATAPAKPSTPSAPTEPAPEAPTPPVKAACALSAAGCVVAGSTSGGGCALSTDGTGKCVVTAA
TDGGAA
Sequence 4D10 in reverse
  (SEQ ID NO: 312)
MSFTRFLQDDPLLTREQVMAELIRVADELNMPDKRGACVIAGMTISQEVGVKDNDPPFERRFWCPANRADPESEN
YPHDSESNDGRSVGYFQQQKGPNGELWWGTTASEMNLHSAATQFMTRLKAAGYNASNAQAANDSAQAIQRSGVPQ
AYKQWWDDINRLYDKVKGSGGGPAPAPKPPQSGPWTGDPVWLADVLRAEGLNVVELPGWLDRGHGDMGRLWGVVC
HHTGSDNTPSSEIAFHPSLGLCSQIHLARNGTVTLCGVGIAWHAGVGSYPGLPEDNANAVTIGIEAQNSGTYDGA
PHRTNWPDAQYDAYVKCCAAICRRLGVRADHVISHKEWAGRKQGKWDPGAIDMNIFRADVQRRIDAHQPNGEDDE
MAALSADEQREVLNLLRVLADRRFVSRSPFRHLGEGPSETVAGFGLNTDGLNHAQYTIELARLGDPTHLALLREV
ASAEGDSRYPDRQYDAKLAKRVLAEIEGAATAPAKPSTPSAPTEPAPEAPTPPVKAACALSAAGCVVAGSTSGGG
CALSTDGTGKCVVTAATDGGAAAGAGAGMSKPWLFTVHGTGQPDPLGPGLPADTARDVLDIYRWQPIGNYPAAAF
PMWPSVEKGVAELILQIELKLDADPYADFAMAGYSQGAIVVGQVLKHHILPPTGRLHRFLHRLKKVIFWGNPMRQ
KGFAHSDEWIHPVAAPDTLGILEDRLENLEQYGFEVRDYAHDGDMYASIKEDDLHEYEVAIGRIVMKASGFIGGR
DSVVAQLIELGQRPITEGIALAGAIIDALTFFARSRMGDKWPHLYNRYPAVEFLRQIWRSLGRTLLRLSHALKPL
ARRSGW
```

[0093] Fusion peptides of the invention may optionally comprise a purification fusion tag, e.g. MHHHHHHSSGVDLGTENLYFQS (SEQ ID NO: 339). The skilled person will appreciate that inclusion of such a purification fusion tag is optional, and the scope of the invention encompasses sequences including these fusion tags, or corresponding sequences with the fusion tags removed. Additionally, the skilled person will appreciate that any suitable fusion tag can be used as an alternative.

[0094] A peptide according to the present invention may be selected from any one or more of libraries 1-3 and 12-16. In some embodiments, the peptide according to the present invention may be selected from library 1, for example selected from the group consisting of SEQ ID NOS: 147-160, 201-265, 267-270, 272, 273, 275-308 and 311. In other embodiments, the peptide according to the present invention may be selected from library 12, for example selected from the group consisting of SEQ ID NOs: 161-200, 266, 271, 274, 309 and 310.

[0095] A peptide according to the present invention may be selected from the exemplary peptides in Table A.

TABLE A
Exemplary peptides of the invention. The following table includes in the white
row a combination of four SEQ ID NOs (e.g. the first cell is a combination
of SEQ ID NOs: 58, 12, 108 and 16), and the cell immediately underneath the
combination denotes the SEQ ID NO for the corresponding fusion protein (e.g.
the first cell as a fusion protein corresponds to SEQ ID NO: 161).

| | | | |
|---|---|---|---|
| 58 + 12 + 108 + 16 | 36 + 18 + 106 + 6 | 36 + 32 + 110 + 2 | 42 + 20 + 112 + 10 |
| SEQ ID NO: 161 | SEQ ID NO: 199 | SEQ ID NO: 237 | SEQ ID NO: 275 |
| 46 + 8 + 112 + 32 | 92 + 20 + 106 + 14 | 76 + 16 + 110 + 14 | 56 + 22 + 106 + 14 |
| SEQ ID NO: 162 | SEQ ID NO: 200 | SEQ ID NO: 238 | SEQ ID NO: 276 |
| 36 + 14 + 110 + 20 | 40 + 28 + 106 + 2 | 90 + 24 + 104 + 14 | 38 + 22 + 110 + 2 |
| SEQ ID NO: 163 | SEQ ID NO: 201 | SEQ ID NO: 239 | SEQ ID NO: 277 |
| 76 + 2 + 106 + 30 | 36 + 20 + 108 + 10 | 36 + 32 + 110 + 14 | 98 + 24 + 106 + 10 |
| SEQ ID NO: 164 | SEQ ID NO: 202 | SEQ ID NO: 240 | SEQ ID NO: 278 |
| 36 + 14 + 112 + 28 | 36 + 16 + 106 + 12 | 82 + 28 + 104 + 14 | 36 + 24 + 110 + 14 |
| SEQ ID NO: 165 | SEQ ID NO: 203 | SEQ ID NO: 241 | SEQ ID NO: 279 |
| 100 + 12 + 110 + 32 | 42 + 18 + 112 + 10 | 58 + 22 + 104 + 12 | 36 + 18 + 110 + 2 |
| SEQ ID NO: 166 | SEQ ID NO: 204 | SEQ ID NO: 242 | SEQ ID NO: 280 |
| 46 + 10 + 104 + 32 | 50 + 16 + 112 + 2 | 44 + 20 + 108 + 2 | 36 + 26 + 112 + 10 |
| SEQ ID NO: 167 | SEQ ID NO: 205 | SEQ ID NO: 243 | SEQ ID NO: 281 |
| 88 + 14 + 108 + 28 | 36 + 26 + 112 + 2 | 66 + 20 + 110 + 10 | 72 + 22 + 106 + 14 |
| SEQ ID NO: 168 | SEQ ID NO: 206 | SEQ ID NO: 244 | SEQ ID NO: 282 |
| 38 + 14 + 104 + 18 | 48 + 16 + 112 + 14 | 36 + 34 + 112 + 10 | 36 + 26 + 106 + 10 |
| SEQ ID NO: 169 | SEQ ID NO: 207 | SEQ ID NO: 245 | SEQ ID NO: 283 |
| 42 + 12 + 108 + 28 | 66 + 20 + 114 + 10 | 80 + 16 + 108 + 2 | 58 + 28 + 106 + 14 |
| SEQ ID NO: 170 | SEQ ID NO: 208 | SEQ ID NO: 246 | SEQ ID NO: 284 |
| 96 + 2 + 110 + 18 | 102 + 16 + 108 + 10 | 44 + 20 + 106 + 14 | 44 + 30 + 108 + 6 |
| SEQ ID NO: 171 | SEQ ID NO: 209 | SEQ ID NO: 247 | SEQ ID NO: 285 |
| 44 + 10 + 104 + 18 | 100 + 18 + 112 + 12 | 74 + 28 + 112 + 14 | 52 + 16 + 112 + 14 |
| SEQ ID NO: 172 | SEQ ID NO: 210 | SEQ ID NO: 248 | SEQ ID NO: 286 |
| 64 + 10 + 112 + 30 | 92 + 28 + 106 + 14 | 36 + 20 + 112 + 10 | 46 + 30 + 104 + 10 |
| SEQ ID NO: 173 | SEQ ID NO: 211 | SEQ ID NO: 249 | SEQ ID NO: 287 |
| 68 + 12 + 106 + 18 | 36 + 18 + 110 + 14 | 38 + 26 + 112 + 10 | 44 + 22 + 110 + 10 |
| SEQ ID NO: 174 | SEQ ID NO: 212 | SEQ ID NO: 250 | SEQ ID NO: 288 |
| 100 + 12 + 104 + 16 | 58 + 20 + 110 + 14 | 36 + 20 + 112 + 4 | 38 + 32 + 106 + 12 |
| SEQ ID NO: 175 | SEQ ID NO: 213 | SEQ ID NO: 251 | SEQ ID NO: 289 |
| 88 + 8 + 110 + 20 | 40 + 32 + 104 + 14 | 52 + 20 + 108 + 2 | 40 + 16 + 112 + 14 |
| SEQ ID NO: 176 | SEQ ID NO: 214 | SEQ ID NO: 252 | SEQ ID NO: 290 |
| 98 + 8 + 110 + 24 | 102 + 34 + 112 + 10 | 36 + 24 + 112 + 10 | 38 + 24 + 114 + 10 |
| SEQ ID NO: 177 | SEQ ID NO: 215 | SEQ ID NO: 253 | SEQ ID NO: 291 |
| 92 + 12 + 104 + 18 | 48 + 16 + 104 + 2 | 38 + 20 + 110 + 2 | 38 + 16 + 104 + 14 |
| SEQ ID NO: 178 | SEQ ID NO: 216 | SEQ ID NO: 254 | SEQ ID NO: 292 |
| 100 + 12 + 104 + 16 | 40 + 20 + 106 + 14 | 42 + 20 + 110 + 14 | 98 + 34 + 112 + 10 |
| SEQ ID NO: 179 | SEQ ID NO: 217 | SEQ ID NO: 255 | SEQ ID NO: 293 |
| 52 + 2 + 112 + 30 | 36 + 18 + 112 + 14 | 78 + 16 + 104 + 14 | 66 + 20 + 112 + 14 |
| SEQ ID NO: 180 | SEQ ID NO: 218 | SEQ ID NO: 256 | SEQ ID NO: 294 |
| 44 + 6 + 110 + 30 | 38 + 16 + 112 + 4 | 38 + 22 + 112 + 2 | 36 + 30 + 112 + 6 |
| SEQ ID NO: 181 | SEQ ID NO: 219 | SEQ ID NO: 257 | SEQ ID NO: 295 |
| 38 + 10 + 112 + 16 | 86 + 20 + 106 + 14 | 38 + 34 + 108 + 14 | 36 + 16 + 112 + 10 |
| SEQ ID NO: 182 | SEQ ID NO: 220 | SEQ ID NO: 258 | SEQ ID NO: 296 |
| 94 + 10 + 108 + 16 | 96 + 16 + 106 + 10 | 36 + 26 + 104 + 10 | 94 + 30 + 106 + 4 |
| SEQ ID NO: 183 | SEQ ID NO: 221 | SEQ ID NO: 259 | SEQ ID NO: 297 |
| 52 + 2 + 112 + 16 | 44 + 26 + 110 + 10 | 86 + 30 + 104 + 14 | 90 + 16 + 112 + 10 |
| SEQ ID NO: 184 | SEQ ID NO: 222 | SEQ ID NO: 260 | SEQ ID NO: 298 |
| 96 + 6 + 112 + 22 | 40 + 32 + 110 + 2 | 36 + 26 + 106 + 6 | 40 + 24 + 110 + 6 |
| SEQ ID NO: 185 | SEQ ID NO: 223 | SEQ ID NO: 261 | SEQ ID NO: 299 |
| 98 + 10 + 108 + 18 | 38 + 16 + 104 + 4 | 40 + 26 + 110 + 8 | 36 + 24 + 104 + 10 |
| SEQ ID NO: 186 | SEQ ID NO: 224 | SEQ ID NO: 262 | SEQ ID NO: 300 |
| 56 + 2 + 104 + 32 | 36 + 20 + 106 + 12 | 36 + 28 + 112 + 10 | 38 + 24 + 104 + 14 |
| SEQ ID NO: 187 | SEQ ID NO: 225 | SEQ ID NO: 263 | SEQ ID NO: 301 |
| 68 + 8 + 104 + 18 | 48 + 34 + 110 + 14 | 36 + 20 + 104 + 14 | 36 + 20 + 104 + 14 |
| SEQ ID NO: 188 | SEQ ID NO: 226 | SEQ ID NO: 264 | SEQ ID NO: 302 |
| 44 + 6 + 112 + 32 | 38 + 30 + 112 + 14 | 78 + 20 + 104 + 10 | 38 + 18 + 108 + 14 |
| SEQ ID NO: 189 | SEQ ID NO: 227 | SEQ ID NO: 265 | SEQ ID NO: 303 |
| 52 + 6 + 112 + 24 | 38 + 18 + 106 + 10 | 52 + 14 + 104 + 28 | 96 + 32 + 104 + 10 |
| SEQ ID NO: 190 | SEQ ID NO: 228 | SEQ ID NO: 266 | SEQ ID NO: 304 |
| 42 + 12 + 110 + 26 | 36 + 26 + 112 + 2 | 58 + 24 + 104 + 14 | 66 + 20 + 108 + 12 |
| SEQ ID NO: 191 | SEQ ID NO: 229 | SEQ ID NO: 267 | SEQ ID NO: 305 |
| 40 + 2 + 110 + 24 | 36 + 20 + 106 + 14 | 66 + 20 + 110 + 6 | 36 + 32 + 104 + 10 |
| SEQ ID NO: 192 | SEQ ID NO: 230 | SEQ ID NO: 268 | SEQ ID NO: 306 |
| 60 + 2 + 104 + 18 | 36 + 24 + 110 + 10 | 86 + 16 + 110 + 2 | 52 + 22 + 108 + 10 |
| SEQ ID NO: 193 | SEQ ID NO: 231 | SEQ ID NO: 269 | SEQ ID NO: 307 |
| 38 + 4 + 110 + 26 | 36 + 18 + 104 + 2 | 86 + 34 + 112 + 10 | 36 + 22 + 110 + 10 |
| SEQ ID NO: 194 | SEQ ID NO: 232 | SEQ ID NO: 270 | SEQ ID NO: 308 |
| 62 + 10 + 104 + 32 | 76 + 26 + 104 + 4 | 36 + 14 + 106 + 28 | 68 + 6 + 104 + 16 |
| SEQ ID NO: 195 | SEQ ID NO: 233 | SEQ ID NO: 271 | SEQ ID NO: 309 |
| 40 + 14 + 106 + 18 | 36 + 20 + 106 + 2 | 36 + 22 + 110 + 2 | 92 + 2 + 106 + 18 |
| SEQ ID NO: 196 | SEQ ID NO: 234 | SEQ ID NO: 272 | SEQ ID NO: 310 |
| 62 + 8 + 110 + 24 | 58 + 30 + 110 + 10 | 44 + 26 + 110 + 10 | 36 + 28 + 110 + 14 |
| SEQ ID NO: 197 | SEQ ID NO: 235 | SEQ ID NO: 273 | SEQ ID NO: 311 |
| 88 + 8 + 108 + 28 | 38 + 20 + 112 + 14 | 98 + 12 + 106 + 28 | 14 + 104 + 16 + 38 |
| SEQ ID NO: 198 | SEQ ID NO: 236 | SEQ ID NO: 274 | SEQ ID NO: 312 |

[0096] A peptide according to the present invention may be used in combination with any one or more different peptides according to the present invention.

[0097] A fragment, variant, fusion or derivative thereof, or a fusion of said fragment, variant or derivative thereof may comprise or consist of at least 2, 3, 4, 5, 6, 7, 8, 9, 10, 11, 12, 13, 14, 15, 16, 17, 18, 19, 20, 30, 40, 50, 60, 70, 80, 90, 100, 120, 140, 160, 180, 200, 300, 400, 500, 600, 700, 800, 900, 1000, 1100, 1200, 1300, 1400, 1500 or 1600 contiguous amino acids of the wildtype domain.

[0098] Peptides of the present invention, including fragments, variants, fusions or derivatives thereof, or a fusion of said fragment, variant or derivatives thereof, may be prepared using known protein engineering techniques. Protein engineering is the field that mimics natural evolution in the lab and aims for the development of proteins with designed features. Protein engineering techniques can be subdivided in mutagenesis and shuffling. In mutagenesis single or multiple nucleotides are substituted/deleted/added, whereas in shuffling longer DNA fragments are exchanged (Harayama, 1998). These techniques serve as tools for directed evolution of proteins, i.e., the creation of diversity by either mutagenesis or shuffling, followed by the selection of variants with desired features (Cobb et al., 2013; Lane & Seelig, 2014).

[0099] Both mutagenesis and shuffling can be performed in a rational manner. For site-directed mutagenesis this means the creation of site-directed point mutations, whereas for shuffling this implies the assembly of predefined gene fragments by restriction and ligation (Tee & Wong, 2013). In contrast, random mutagenesis creates randomly distributed mutations over the length of a selected DNA sequence. For example, error-prone PCR uses modified PCR parameters (DNA polymerase fidelity, dNTP, Mg²⁺ and Mn²⁺ concentrations) to introduce random mutations during amplification (Pritchard et al., 2005). Unlike mutagenesis, random shuffling is until today only possible for highly homologous genes (>70% similarity) (Nordwald et al., 2013). E.g., family shuffling uses DnaseI to randomly digest members of the same gene family followed by recombination between homologous regions and creation of a hybrid gene (Crameri et al., 1998).

[0100] An alternative method, Golden Gate shuffling, has been developed by (Engler et al., 2009) to shuffle both rationally and randomly fragments of homologous genes. Herein, Type IIs restriction enzymes inherent ability to directionally cut outside their recognition site is exploited to reduce both restriction and ligation to a one step, one pot reaction (Engler et al., 2009; Engler et al., 2008). This method can be used to simultaneously clone multiple fragments with a high efficiency. However, Golden Gate shuffling is limited in that only one variant of a peptide can be created at a time, which causes time limitations and is lab/labour intensive.

[0101] VersaTile shuffling has now been developed to efficiently shuffle and assemble fragments from non-homologous genes (Grimon et al., 2019), which can be used to develop libraries of peptides. Due to technological constraints the high-throughput rational and random assembly of nonhomologous genes was before not yet possible without reliance on time-consuming techniques, such as Golden Gate assembly. VersaTile shuffling, which is optimized for high yield in a shorter time, thus expands the possibilities of protein engineering towards the shuffling of non-homologous genes, hereby enabling the creation of totally new hybrid proteins with new protein functionalities. This novel technique can be exploited to generate and clone an unprecedented amount of new modular fusion peptides, for example those of the present invention. New fusion peptides falling within the scope of the present invention can therefore be generated starting from a repository of different Tiles (e.g. AMPs, LysB, LysA, optionally connected together via linkers).

[0102] Peptides of the present invention, including fragments, variants, fusions or derivatives thereof, or a fusion of said fragment, variant or derivatives thereof, may be purified using known purification techniques, thereby obtaining an isolated peptide, fragment, variant, fusion or derivative thereof, or an isolated fusion of said fragment, variant or derivative thereof. For example, purification may be by affinity chromatography, ion exchange chromatography, hydrophobic interactions, multimodal chromatography, gel filtration and/or size exclusion. In some embodiments, purification is by affinity chromatography, for example Immobilized Metal Affinity Chromatography (IMAC). The skilled person will appreciate that any suitable IMAC matrix can be used, for example a nickel column. In some embodiments, purification may be performed by using a HisTrap FF™ nickel column (GE Healthcare Bio-Sciences AB, Uppsala, Sweden).

[0103] At a minimum, the present invention refers to a peptide comprising three domains, wherein the domains have: (i) activity specific to a peptidoglycan or component thereof (a first domain); (ii) activity specific to an ester linkage (a second domain); and (iii) membrane permeabilising activity (a third domain). However, the peptide may further comprise additional domains that correspond to a first, second and/or third domain. For example, a peptide may comprise at least one first domain, at least one second domain, and at least one third domain. For example, a peptide may comprise two (or more) first domains without limitation to the number of second or third domains (e.g. 1, 2, or more) are present.

[0104] The arrangement of the domains may be in any order. Thus, the term “first position” in exemplary embodiments below merely refers to the first domain in a chain of domains that make up the peptides of the present invention. The nomenclature of first, second, third, fourth position and so on is merely to illustrate an optional order for the domains within a peptide.

[0105] For example, a peptide may comprise the first, second and third domains in any of the following orders (positions in order from N to C terminal):
[0106] (i) third domain-second domain-first domain (e.g. AMP-LysB-LysA)
[0107] (ii) third domain-first domain-second domain (e.g. AMP-LysA-LysB)
[0108] (iii) first domain-second domain-third domain (e.g. LysA-LysB-AMP)
[0109] (iv) second domain-first domain-third domain (e.g. LysB-LysA-AMP)
[0110] (v) first domain-third domain-second domain (e.g. LysA-AMP-LysB); or
[0111] (vi) second domain-third domain-first domain (e.g. LysB-AMP-LysA)

[0112] Additionally, as discussed in more detail below, multiple copies or versions of each domain may be present, for example there may be multiple first domains in the peptide and/or multiple second domains in the peptide and/or multiple third domains in the peptide.

[0113] Thus, in example embodiments, a peptide may be comprised of the following domains from N-terminal to C-terminal:

| First | Second | Third | Fourth | Fifth |
|---|---|---|---|---|
| position | position | position | position | position |
| Third domain | Second domain | First domain | — | — |
| (e.g. AMP) | (e.g. LysB) | (e.g. LysA) | | |
| Third domain | Second domain | First domain | Fourth domain | — |
| (e.g. AMP) | (e.g. LysB) | (e.g. LysA) | (e.g. PTD) | |
| Third domain | First domain | Second domain | — | — |
| (e.g. AMP) | (e.g. LysA) | (e.g. LysB) | | |
| First domain | Third domain | Third domain | Second domain | — |
| (e.g. LysA) | (e.g. AMP) | (e.g. AMP) | (e.g. LysB) | |
| Fourth domain | Third domain | First domain | Second domain | Third domain |
| (e.g. PTD) | (e.g. AMP) | (e.g. LysA) | (e.g. LysB) | (e.g. AMP) |
| Second domain | Fourth domain | Third domain | First domain | — |
| (e.g. LysB) | (e.g. PTD) | (e.g. AMP) | (e.g. LysA) | |
| Third domain | Third domain | Third domain | First domain | Second domain |
| (e.g. AMP) | (e.g. AMP) | (e.g. AMP) | (e.g. LysA) | (e.g. LysB) |
| First domain | Second domain | First domain | Third domain | Fourth domain |
| (e.g. LysA) | (e.g. LysB) | (e.g. LysA) | (e.g. AMP) | (e.g. PTD) |
| Second domain | First domain | Third domain | — | — |
| (e.g. LysB) | (e.g. LysA) | (e.g. AMP) | | |
| First domain | Second domain | Third domain | — | — |
| (e.g. LysA) | (e.g. LysB) | (e.g. AMP) | | |
| Second domain | Third domain | First domain | — | — |
| (e.g. LysB) | (e.g. AMP) | (e.g. LysA) | | |

[0114] Accordingly, the domains are interchangeable within the peptides provided the minimum three domains are present, as described above. Additional domains, including repeats of the type of domain, or linkers may be introduced at the N-terminus, C-terminus, and/or between any of the first, second, third, fourth or fifth positions above. In some embodiments, a peptide may comprise a linker between every domain in each position above, but not present at the C- or N-terminus. In some embodiments, a peptide may comprise no linkers. In some embodiments, a peptide may comprise only one linker between two domains. In some embodiments, the LysA may be in the form of an EAD derived from the LysA. Exemplary EAD include amino acid sequences corresponding to SEQ ID NOS: 326-338, as encoded by the nucleic acid sequences corresponding to SEQ ID NOs: 313-325, respectively.

[0115] In some embodiments, the peptide may comprise at least one first domain (e.g. at least one LysA), at least one second domain (e.g. LysB) and at least one third domain (membrane permeabiliser, e.g. an AMP or holin). In some embodiments, the peptide may comprise at least one first domain (e.g. LysA), at least one second domain (e.g. LysB), and at least one third domain (membrane permeabiliser), optionally further comprising at least one fourth domain (PTD/CPP). Either of these embodiments, or any further embodiments described herein, may further comprise at least one linker at any position between domains.

[0116] In some embodiments, a peptide may comprise multiple iterations of a particular domain (or of multiple domains, including multiple iterations of all domains). For example, a peptide may comprise 1, 2, 3, 4, 5, 6, 7, 8, 9, 10, or more domains with activity specific to a peptidoglycan or component thereof (first domain); 1, 2, 3, 4, 5, 6, 7, 8, 9, 10, or more domains with activity specific to an ester linkage (second domain); and/or 1, 2, 3, 4, 5, 6, 7, 8, 9, 10, or more domains with membrane permeabilising activity (third domain); and/or 1, 2, 3, 4, 5, 6, 7, 8, 9, 10, or more protein transduction domains (PTDs). Each domain may be in any order and thus fused to any other domain (either directly or indirectly). By “directly” we include the meaning that the domains are fused to each other without a linker between each domain. By “indirectly” we include the meaning that the domains are fused to each other either via a linker or via at least one other domain in-between. For example, at least one LysA could be indirectly linked to at least one AMP via at least one LysB, or via at least one linker.

[0117] When multiple iterations of a particular domain are present (e.g. multiple first domains) these may be multiple copies of the same domain (e.g. multiple LysA domains) or different ‘first domains’ which differ in sequence/structure, but all share the common functional property of activity specific to a peptidoglycan or component thereof (e.g. multiple different EADs).

[0118] In one embodiment, the peptide comprises of the following domains from N-terminal to C-terminal: third domain (e.g. AMP), second domain (e.g. LysB), first domain (e.g. LysA). In the same or different embodiments, the peptide may also comprise a linker between the second and first domain and/or may comprise one or more PTD domains at the C terminal end of the arrangement. For example, the peptide may comprise AMP-LysB-LysA, AMP-LysB-LysA-PTDs, AMP-LysB-Linker-LysA or AMP-LysB-Linker-LysA-PTDs.

[0119] In one embodiment, the peptide does not comprise the following domains from N-terminal to C-terminal: third domain (e.g. AMP), second domain (e.g. LysB), first domain (e.g. LysA). In another embodiment the peptide does not comprise the following domains from N-terminal to C-terminal: third domain (e.g. AMP), second domain (e.g. LysB), first domain (e.g. LysA) wherein there is a linker between the second and first domain. Thus, in one embodiment the peptide does not comprise the following arrangement: AMP-LysB-Linker-EAD. In another embodiment, the peptide does not comprise the following arrangement: AMP-LysB-EAD.

[0120] Accordingly in some embodiments, the peptide does not comprise one or more of the following arrangements:
[0121] (a) AMP-LysB-Linker-LysA
[0122] (b) AMP-LysB-LysA
[0123] (c) AMP-LysB-Linker-EAD
[0124] (d) AMP-LysB-EAD
[0125] (e) AMP-LysB-Linker-LysA-PTD
[0126] (f) AMP-LysB-LysA-PTD.

[0127] In some embodiments, the peptides of the invention do not exceed 120 kDa. For example, a peptide may be about 10 kDa, 20 kDa, 30 kDa, 40 kDa, 50 kDa, 60 kDa, 70 kDa, 80 kDa, 90 kDa, 100 kDa, 110 kDa, or 120 kDa.

[0128] As specified above, peptides of the present invention optionally further comprise at least one linker (i.e. linker peptides). Linkers are comprised of at least one amino acid, more typically a chain of two or more amino acids, that are fused to and between domains of peptides. In some embodiments, a linker may not be required at all. In some embodiments, a linker may be required only between particular domains. For example, a linker may be required to prevent steric hindrance between two domains (i.e. where an entire LysA and LysB are present, depending on their sizes, a linker may be beneficial, albeit not necessarily compulsory, to retaining their function). In some embodiments, where an entire LysA and/or LysB is included, a linker may be of higher importance (especially for certain LysA that are known to be particularly large in size) to reduce risk of steric hindrance.

[0129] Any of the domains described herein that are fused to or between any other domain may be considered a linker. For example, in a fusion peptide comprised of LysA-LysB-AMP, the LysB may be considered a linker between LysA and AMP, and/or the AMP or LysA may be considered a linker attached to LysB (which optionally may link LysB to further domains and/or components/portions thereof). In some embodiments, linkers do not correspond to any of the domains (i.e. the domains with specified activity), but instead correspond to further amino acids or stretches thereof. In another example, in a fusion peptide comprised of LysB-AMP-LysA, the AMP may be considered a linker between LysB and LysA, and/or the LysB or LysA may be considered a linker attached to AMP (which optionally may link AMP to further domains and/or components/portions thereof).

[0130] Accordingly, the purpose of a linker is to connect to a domain. In some embodiments, at least one linker connects:
[0131] 1. the first domain to the second domain;
[0132] 2. the second domain to the third domain;
[0133] 3. the first domain to the third domain;
[0134] 4. the first domain to the fourth domain;
[0135] 5. the second domain to the fourth domain;
[0136] 6. the third domain to the fourth domain; and/or
[0137] 7. a domain to a further linker.

[0138] Linkers may be present in tandem (either as repeats of the same linker, or as two or more linkers connected to each other). All linkers of the present invention can be in either orientation. For example, where a sequence is provided for a linker, that sequence may be fused to any other domain or linker by its N- and/or C-terminus, and so any sequence written N- to C-terminally would equally be valid written C- to N-terminally in a fusion peptide.

[0139] Linkers can be of any length. In some embodiments, linkers are between 1 and 100 amino acids in length, for example, between 5 and 50 amino acids in length, between 10 and 30 amino acids in length, and/or between 15 and 20 amino acids in length. Where more than one linker is present in a peptide, each linker may correspond to the same sequence or different sequences. Preferably, the linker is of a length that does not disrupt any one or more of the beneficial activities of the peptide of the invention.

[0140] In one embodiment, linkers that are not domains may comprise any one or more (or multiple repeats) of the amino acid sequences (in either orientation) selected from any one or more of SEQ ID NOs: 104, 106, 108, 110, 112 or 114; or said linkers may be encoded by any one or more of the nucleotide sequences of SEQ ID NO: 103, 105, 107, 109, 111 or 113, as follows:

Length: 18
Type: DNA
Other information: Linker-A (also known as “L1”)
Sequence ID No: 103
GCGGGTGCGGGTGCGGGT
Length: 6
Molecular weight: 0.4 kDa
Type: Protein
Feature: Flexible short linker
Other information: Linker-A (also known as “L1”)
Sequence ID No: 104
AGAGAG
Length: 27
Type: DNA
Other information: Linker-B (also known as “L4”)
Sequence ID No: 105
CTGTCTCGTTTCTTCCACGCGGAACTG
Length: 9
Molecular weight: 1.119 kDa
Type: Protein
Feature: Rigid short helix
Other information: Linker-B (also known as “L4”)
Sequence ID No: 106
LSRFFHAEL
Length: 42
Type: DNA
Other information: Linker-C (also known as “L5”)
Sequence ID No: 107
GTTTTCAACCAGCGTAAAGAACACAAAGGTTACATGCTGGCG
Length: 14
Molecular weight: 1.721 kDa
Type: Protein
Feature: Rigid long helix
Other information: Linker-C (also known as “L5”)
Sequence ID No: 108
VFNQRKEHKGYMLA
Length: 48
Type: DNA
Other information: Linker-D (also known as “L6”)
Sequence ID No: 109
ATCCCGCAGGGTCGTTCTCACCCGGTTCAGCCGTACCCGGGTGCGTTC
Length: 16
Molecular weight: 1.75 kDa
Type: Protein
Feature: Rigid long coil
Other information: Linker-D (also known as “L6”)
Sequence ID No: 110
IPQGRSHPVQPYPGAF
Length: 18
Type: DNA
Other information: Linker-E (also known as “L7”)
Sequence ID No: 111
CCGGCGGTTCCGCCGCCG
Length: 6
Molecular weight: 0.576 kDa
Type: Protein
Feature: Rigid short coil
Other information: Linker-E (also known as “L7”)
Sequence ID No: 112
PAVPPP
Length: 39
Type: DNA
Other information: Linker-F (also known as “L8”)
Sequence ID No: 113
GAAGCGGCGGCGAAAGAAGCGGCGAAAGAAGCGGCGAAA
Length: 13
Molecular weight: 1.287 kDa
Type: Protein
Feature: Rigid optimal helix
Other information: Linker-F (also known as “L8”)
Sequence ID No: 114
EAAAKEAAKEAAK

[0141] Alternatively or additionally, the linkers may also be variants, fragments, fusions or derivatives of the sequences given above, or fusions of said fragments, variants and derivatives thereof.

[0142] In some embodiments, the peptide comprises at least one lysin as defined herein (e.g. an endolysin, such as LysA, and/or an enzyme with lipolytic activity, such as LysB; or a portion of any of the aforementioned (e.g. an EAD)) that is effective against the phylum Actinobacteria; derived from the class Actinobacteridae; derived from the order Actinomycetales, and/or Bifidobacteriales. Optionally wherein at least one lysin is effective against a subclass and/or family selected from the list consisting of: Actinomycineae: Actinomycetaceae (Actinomyces, Mobiluncus); Corynebacterineae: Mycobacteriaceae (Mycobacterium), Nocardiaceae; Frankineae: Frankiaceae; Micrococcineae: Brevibacteriaceae; Propionibacteriaceae (Propionibacterium); Bifidobacteriaceae (Bifidobacterium, Falcivibrio, Gardnerella); Acidimicrobidae, Coriobacteridae, Rubrobacteridae, Sphaerobacteridae.

[0143] In some embodiments, at least one domain defined herein, such as a lysin as defined herein (e.g. an endolysin, such as LysA, or a portion of any of the aforementioned (e.g. an EAD)) may be derived from a bacteriophage capable of infecting gram positive bacteria and/or gram negative bacteria and/or mycobacteria. In some embodiments, at least one domain defined herein, such as a lysin as defined herein (e.g. an enzyme with lipolytic activity, such as LysB; or a portion of any of the aforementioned (e.g. an EAD)) may be derived from a bacteriophage capable of infecting mycobacteria.

[0144] In some embodiments, at least one domain defined herein, such as a lysin as defined herein (e.g. an endolysin, such as LysA, and/or an enzyme with lipolytic activity, such as LysB; or a portion of any of the aforementioned (e.g. an EAD)) may comprise or consist of the amino acid sequence corresponding to any one of SEQ ID NOS: 1-32.

[0145] In one embodiment one or more domains are derived from a mycobacteriophage capable of infecting mycobacterium. Mycobacteriophages may be in the form of a prophage, wherein the genetic material of a bacteriophage is incorporated into a host (bacterium), and the host is able to produce phages. The term “mycobacteriophage” therefore includes phages produced by a prophage of said mycobacteriophage. Thus, in some embodiments, the peptide comprises at least one domain defined here, such as a lysin as defined herein (e.g. an endolysin, such as LysA, and/or an enzyme with lipolytic activity, such as LysB; or a portion of any of the aforementioned (e.g. an EAD)) that is derived from a mycobacteriophage or a Mycobacterium prophage selected from the group consisting of: TM4, D29, L5, Bxz2, Saal, Enkosi, Ms6, Omega, Obama12, Echild, DS6A, Pumpkin or any other mycobacteriophage as listed in The Actinobacteriophage Database (see phagesdb.org/hosts/genera/1/). Peptides described herein may comprise lysins and/or components/portions thereof all derived from the same mycobacteriophage or from multiple mycobacteriophages. For example, a peptide may be a fusion of domains derived from at least 2 mycobacteriophages, optionally at least 3, 4, 5, 6, 7, 8, 9, 10 or more mycobacteriophages. For example, a peptide may be a fusion of at least one LysA (and/or portion thereof) derived from TM4 and at least one LysB (and/or portion thereof) derived from D29.

[0146] Peptide of the present invention have antimicrobial properties. In one embodiment, the peptides are for use treating bacterial infection, for example mycobacterial infection. The peptides may be used for treating any bacterial infection caused by a bacterial species with mycolic acids present in the cell envelope or substantially free from mycolic acid. Accordingly, in some embodiments, the peptide is capable of disrupting the cell membrane of gram-positive bacteria that have mycolic acids in their cell membrane. In some embodiments, the peptides are capable of disrupting the cell membrane of mycobacteria. Species of Mycobacterium include, but are not limited to: Mycobacterium abscessus, Mycobacterium tuberculosis, Mycobacterium microti, Mycobacterium africanum, Mycobacterium bovis, Mycobacterium canettii, Mycobacterium pinnipedii, Mycobacterium caprae, Mycobacterium mungi, Mycobacterium leprae, Mycobacterium ulcerans, Mycobacterium xenopi, Mycobacterium shottsii, Mycobacterium avium, Mycobacterium avium subsp. paratuberculosis, Mycobacterium paratuberculosis, Mycobacterium intracellulare, Mycobacterium smegmatis, Mycobacterium kansasii, Mycobacterium terrae, Mycobacterium nonchromogenicum, Mycobacterium gordonae, and Mycobacterium triviale, and non-tuberculosis mycobacteria (NTM). In one preferable embodiment, the peptides are capable of disrupting the cell membrane of Mycobacterium abscessus.

[0147] In some embodiments, the bacterium (e.g. mycobacterium) may be drug resistant (e.g. multidrug resistant). For example, the target bacteria may be resistant to at least one drug, optionally at least 2, 3, 4, 5, 6, 7, 8, 9, 10 or more drugs. By “drug resistant” we include the meaning that the bacterium (e.g. mycobacterium) is not susceptible to treatment with an antibacterial (or antimycobacterial) agent. Accordingly, the bacteria may be multidrug-resistant (MDR), extremely drug-resistant (XDR), or totally drug-resistant (TDR). The uses described herein may facilitate the function of further therapeutic agents. Drug resistance may arise due to specific components and/or configurations of the cell wall. Drug resistant strains of bacteria, for example, tend to have thicker cell walls. Thus, peptides and uses thereof described herein may affect the cell envelope in such a way as to facilitate the function of a further therapeutic agent (for example, an agent that acts intracellularly to the bacteria). However, the composition of MDR, XDR and/or TDR strains remains largely the same. Accordingly, the effectiveness of various peptides herein against the MDR strain M. abscessus means it is likely that other drug resistant strains would also be susceptible. In one embodiment, the peptide is effective in treating the MDR strain M. abscessus. For example, the peptide may cause disruption of the cell membrane of the MDR strain M. abscessus, thereby resulting in osmotic shock and death of the mycobacterium.

[0148] Tuberculosis, for example, which results from an infection with Mycobacterium tuberculosis, can be cured with a combination of first-line drugs taken daily for several months. MDR TB occurs when a Mycobacterium tuberculosis strain is resistant to isoniazid and rifampin, two of the most powerful first-line drugs. To cure MDR TB, healthcare providers must turn to a combination of second-line drugs, several of which are shown here. Second-line drugs may have more side effects, the treatment may last much longer, and the cost may be up to 100 times more than first-line therapy. MDR TB strains can also grow resistant to second-line drugs, further complicating treatment. XDR TB occurs when a Mycobacterium tuberculosis strain is resistant to isoniazid and rifampin, two of the most powerful first-line drugs, as well as key drugs of the second line regimen-any fluoroquinolone and at least one of the three injectable drugs shown above. XDR TB strains may also be resistant to additional drugs, greatly complicating therapy.

[0149] In some embodiments, the peptides are for use in treating co-infections. For example, the peptides may be for use in treating someone that has a viral infection who may be more susceptible to, or already infected with, a bacterial (e.g. infection) infection. In some embodiments, the viral infection is selected from one or more of the groups consisting of: coronavirus, HIV, influenza, viral pneumonia, enterovirus and norovirus.

[0150] In some embodiments, the peptide of the present invention is not the following: a peptide which comprises an outer membrane acting biologic and a mycobacterial chemotherapeutic, but which lacks a domain with specific activity to a peptidoglycan layer.

[0151] In other embodiments, the peptide of the invention is not a peptide which has an outer membrane acting biologic that is LysB or D29 phage LysB and which further comprises a mycobacterial chemotherapeutic, but which lacks a domain with specific activity to a peptidoglycan layer.

[0152] In yet other embodiments, the peptide of the invention is not a peptide which has an outer membrane acting biologic that is LysB or D29 phage LysB and which further comprises a mycobacterial chemotherapeutic, but which lacks a LysA domain with specific activity to a peptidoglycan layer.

[0153] In another embodiments, the peptides of the present invention are not:
[0154] a fusion protein comprising a LysA and AMP (but not comprising a LysB) or
[0155] a fusion peptide comprising a LysB and AMP (but not comprising a LysA).

[0156] Thus in one embodiment any peptide which does not comprise, as a single peptide, at least a LysA, a LysB and an AMP, is excluded.

[0157] In a second aspect of the invention, the peptide may be in the form of a composition (e.g. a pharmaceutical composition. Accordingly, a composition comprising a peptide may be any one or more of the peptides as defined herein, in any combination or permutation, provided that the composition retains the intended activity (or at least a portion of the intended activity). In some embodiments a composition may comprise a further agent, for example a pharmaceutically acceptable excipient, diluent, carrier, buffer and/or adjuvant.

[0158] Additional compounds may also be included in the pharmaceutical compositions, such as other peptides, low molecular weight immunomodulating agents, receptor agonists and antagonists, and antimicrobial agents. Other examples include chelating agents such as EDTA, citrate, EGTA or glutathione.

[0159] The pharmaceutical compositions may be prepared in a manner known in the art that is sufficiently storage stable and suitable for administration to humans and animals. The pharmaceutical compositions may be lyophilised, e.g. through freeze drying, spray drying, spray cooling, or through use of particle formation from supercritical particle formation.

[0160] By “pharmaceutically acceptable” we mean a non-toxic material that does not decrease the effectiveness of the biological activity of the active ingredients, i.e. the antimicrobial polypeptide(s) of the composition. Such pharmaceutically acceptable buffers, carriers or excipients are well-known in the art (see Remington's Pharmaceutical Sciences, 18th edition, A. R Gennaro, Ed., Mack Publishing Company (1990) and handbook of Pharmaceutical Excipients, 3rd edition, A. Kibbe, Ed., Pharmaceutical Press (2000)).

[0161] The term “buffer” is intended to mean an aqueous solution containing an acid-base mixture with the purpose of stabilising pH. Examples of buffers are Trizma, Bicine, Tricine, MOPS, MOPSO, MOBS, Tris, Hepes, HEPBS, MES, phosphate, carbonate, acetate, citrate, glycolate, lactate, borate, ACES, ADA, tartrate, AMP, AMPD, AMPSO, BES, CABS, cacodylate, CHES, DIPSO, EPPS, ethanolamine, glycine, HEPPSO, imidazole, imidazolelactic acid, PIPES, SSC, SSPE, POPSO, TAPS, TABS, TAPSO and TES.

[0162] The term “diluent” is intended to mean an aqueous or non-aqueous solution with the purpose of diluting the peptide in the pharmaceutical preparation. The diluent may be one or more of saline, water, polyethylene glycol, propylene glycol, ethanol or oils (such as safflower oil, corn oil, peanut oil, cottonseed oil or sesame oil).

[0163] The term “adjuvant” is intended to mean any compound added to the formulation to increase the biological effect of the peptide of the composition. The adjuvant may be one or more of colloidal silver, or zinc, copper or silver salts with different anions, for example, but not limited to fluoride, chloride, bromide, iodide, thiocyanate, sulfite, hydroxide, phosphate, carbonate, lactate, glycolate, citrate, borate, tartrate, and acetates of different acyl composition. The adjuvant may also be cationic polymers such as PHMB, cationic cellulose ethers, cationic cellulose esters, deacetylated hyaluronic acid, chitosan, cationic dendrimers, cationic synthetic polymers such as poly(vinyl imidazole), and cationic polypeptides such as polyhistidine, polylysine, polyarginine, and peptides containing these amino acids.

[0164] The excipient may be one or more of carbohydrates, polymers, lipids, detergents and minerals. Examples of carbohydrates include lactose, sucrose, mannitol, and cyclodextrines, which are added to the composition, e.g., for facilitating lyophilisation. Examples of polymers are starch, cellulose ethers, cellulose, carboxymethylcellulose, hydroxypropylmethyl cellulose, hydroxyethyl cellulose, ethylhydroxyethyl cellulose, ethyl cellulose, methyl cellulose, propyl cellulose, alginates, carageenans, hyaluronic acid and derivatives thereof, polyacrylic acid, polysulphonate, polyethylenglycol/polyethylene oxide, polyethyleneoxide/polypropylene oxide copolymers, polyvinylalcohol/polyvinylacetate of different degree of hydrolysis, poly(lactic acid), poly(glycholic acid) or copolymers thereof with various composition, and polyvinylpyrrolidone, all of different molecular weight, which are added to the composition, e.g. for viscosity control, for achieving bioadhesion, or for protecting the active ingredient (applies to A-C as well) from chemical and proteolytic degradation. Examples of lipids are fatty acids, phospholipids, mono-, di-, and triglycerides, ceramides, sphingolipids and glycolipids, all of different acyl chain length and saturation, egg lecithin, soy lecithin, hydrogenated egg and soy lecithin, which are added to the composition for reasons similar to those for polymers. Examples of minerals are talc, magnesium oxide, zinc oxide and titanium oxide, which are added to the composition to obtain benefits such as reduction of liquid accumulation or advantageous pigment properties.

[0165] The pharmaceutical composition may also contain one or more mono- or di-saccharides such as xylitol, sorbitol, mannitol, lactitiol, isomalt, maltitol, glycerol or xylosides, and/or monoacylglycerols, such as monolaurin. The characteristics of the carrier are dependent on the route of administration. One route of administration is topical administration. For example, for topical administrations, a preferred carrier is an emulsified cream comprising the active peptide, but other common carriers such as certain petrolatum/mineral-based and vegetable-based ointments can be used, as well as polymer gels, liquid crystalline phases and microemulsions.

[0166] The pharmaceutical compositions of the invention may also be in the form of a liposome, in which the peptide is combined, in addition to other pharmaceutically acceptable carriers, with amphipathic agents such as lipids, which exist in aggregated forms as micelles, insoluble monolayers and liquid crystals. Suitable lipids for liposomal formulation include, without limitation, monoglycerides, diglycerides, sulfatides, lysolecithin, phospholipids, saponin, bile acids, and the like. Suitable lipids also include the lipids above modified by poly (ethylene glycol) in the polar headgroup for prolonging bloodstream circulation time. Preparation of such liposomal formulations can be found in for example U.S. Pat. No. 4,235,871.

[0167] The pharmaceutical compositions of the invention may also be in the form of biodegradable microspheres. Aliphatic polyesters, such as poly(lactic acid) (PLA), poly(glycolic acid) (PGA), copolymers of PLA and PGA (PLGA) or poly(caprolactone) (PCL), and polyanhydrides have been widely used as biodegradable polymers in the production of microspheres. Preparations of such microspheres can be found in U.S. Pat. No. 5,851,451 and in EP 213 303.

[0168] The pharmaceutical compositions of the invention may also be formulated with micellar systems formed by surfactants and block copolymers, preferably those containing poly(ethylene oxide) moieties for prolonging bloodstream circulation time.

[0169] The pharmaceutical compositions of the invention may also be in the form of polymer gels, where polymers such as starch, cellulose ethers, cellulose, carboxymethylcellulose, hydroxypropylmethyl cellulose, hydroxyethyl cellulose, ethylhydroxyethyl cellulose, ethyl cellulose, methyl cellulose, propyl cellulose, alginates, chitosan, carrageenan, hyaluronic acid and derivatives thereof, polyacrylic acid, polyvinyl imidazole, polysulphonate, polyethylenglycol/polyethylene oxide, polyethylene-oxide/polypropylene oxide copolymers, polyvinylalcohol/polyvinylacetate of different degree of hydrolysis, and polyvinylpyrrolidone are used for thickening of the solution containing the peptide. The polymers may also comprise gelatin or collagen.

[0170] The pharmaceutical composition may also include ions and a defined pH for potentiation of action of the activities of peptides (e.g. the activity as described above for any of the domains).

[0171] The above compositions of the invention may be subjected to conventional pharmaceutical operations such as sterilisation and/or may contain conventional adjuvants such as preservatives, stabilisers, wetting agents, emulsifiers, buffers, fillers, etc., e.g., as disclosed elsewhere herein.

[0172] It will be appreciated by persons skilled in the art that the pharmaceutical compositions and/or peptides of the invention may be administered locally or systemically. Routes of administration include topical (e.g. ophthalmic), ocular, nasal, pulmonary, buccal, parenteral (intravenous, subcutaneous, and intramuscular), oral, vaginal and rectal. In one embodiment the administration may be respiratory, for example by inhalation either orally or nasally. Such administration is also referred to as inhalation or pulmonary administration. Also, administration from implants is possible. Suitable preparation forms are, for example granules, powders, tablets, coated tablets, (micro) capsules, suppositories, syrups, emulsions, microemulsions, defined as optically isotropic thermodynamically stable systems consisting of water, oil and surfactant, liquid crystalline phases, defined as systems characterised by long-range order but short-range disorder (examples include lamellar, hexagonal and cubic phases, either water- or oil continuous), or their dispersed counterparts, gels, ointments, dispersions, suspensions, creams, aerosols, wafers, droplets or injectable solution in ampoule form and also preparations with protracted release of active compounds, in whose preparation excipients, diluents, adjuvants or carriers are customarily used as described above. The pharmaceutical composition and/or peptide may also be provided in bandages, plasters or in sutures or the like.

[0173] In some embodiments, the pharmaceutical composition and/or peptide is suitable for oral administration, parenteral administration and/or topical administration. For example, the pharmaceutical composition may be suitable for topical administration (e.g. ophthalmic administration, in the form of a spray, lotion, paste or drops etc.). The route of administration may depend on the type of infection. For example, inhalation/pulmonary routes of administration are more beneficial for treating TB infection.

[0174] The pharmaceutical compositions will be administered to a patient in a pharmaceutically effective dose. By “pharmaceutically effective dose” is meant a dose that is sufficient to produce the desired effects in relation to the condition for which it is administered. The exact dose is dependent on the activity of the compound, manner of administration, nature and severity of the disorder, age and body weight of the patient, whereby different and/or adapted doses may be needed. The administration of the dose can be carried out both by single administration in the form of an individual dose unit or else several smaller dose units and also by multiple administrations of subdivided doses at specific intervals.

[0175] The pharmaceutical compositions of the invention may be administered alone or in combination with other therapeutic agents, such as additional antibiotic, anti-inflammatory, immunosuppressive, proteases, vasoactive and/or antiseptic agents (such as anti-bacterial agents, anti-fungicides, anti-viral agents, and anti-parasitic agents). Examples of suitable additional antibiotic agents include penicillins, cephalosporins, carbacephems, cephamycins, carbapenems, monobactams, aminoglycosides, glycopeptides, quinolones, tetracyclines, macrolides, and fluoroquinolones. Antiseptic agents include iodine, silver, copper, chlorhexidine, polyhexanide and other biguanides, chitosan, acetic acid, and hydrogen peroxide. Likewise, the pharmaceutical compositions may also contain anti-inflammatory drugs, such as steroids and macrolactam derivatives. The further therapeutic agent may be selected depending on the target bacterium, for example the combination therapy may be with anti-TB drugs if TB is the intended target.

[0176] Further therapeutic agents may be mycobacterial chemotherapeutics that are antibiotics, including any one or more agent selected from the list consisting of: isoniazid, pyrazinamide, ethambutol, or rifampin, fluoroquinolones (e.g. ciprofloxacin, levofloxacin, moxifloxacin), cyclic peptides (e.g. capreomycin, viomycin, enviomycin), thioamides (e.g. ethionamide, prothionamide), cycloserine, terizidone, an aminoglycoside, PAS, kanamycin, capreomycin, amikacin, streptomycin, macrolide, a β-lactam, a β-lactamase inhibitor, clavulanic acid, trimethoprim, or sulfamethoxazole, clarithromycin, rifampicin, rifabutin, amikacin, azithromycin, or moxifloxacin, diarylquinoline, bedaquiline, dedaquiline, TMC207, nitroimidazoles (including PA-824 and OPC-67683), oxazolidinones (including linezolid, sutezolid, and AZD5847), BTZ043, and SQ109.

[0177] Combination therapies as described herein may have: (i) enhanced potency, which may allow the dose of peptides of the present invention to be attenuated; (ii) a low (or lower) chance (e.g. compared with peptides of the present invention alone, and/or compared with known therapies, including known combination therapies) of having resistance developed against them; (ii) increased specificity (for example, due to the CBD derived from LysA improving specificity to cell walls of interest, including mycobacterial cell walls); and/or (iv) improved activity intracellularly (e.g. due to fusion with a PTD as described herein).

[0178] Such additional therapeutic agents may be incorporated as part of the same pharmaceutical composition or may be administered separately. Additional therapeutic agents can be administered simultaneously, sequentially and/or separately, either before, after and/or during administration of a pharmaceutical composition described herein.

[0179] It will be appreciated by persons skilled in the art that the peptides of the invention, compositions of the invention, and/or pharmaceutical compositions thereof, may be applied to devices (such as medical devices) and other products the implantation into or application of which to the human or animal body is associated with the risk of infection by a microbial agent. The purpose of applying peptides, compositions and/or pharmaceutical compositions of the invention may be to protect devices (e.g. medical devices) from mycobacterial infection. Accordingly, in some embodiments, the peptides, compositions and/or pharmaceutical compositions of the invention may be at least a surface coating on a device. Alternatively, or additionally, a device comprising a peptide, composition and/or pharmaceutical composition of the invention may be for use in recognition, prevention, monitoring, treatment and/or alleviation of mycobacteria or mycobacterial diseases.

[0180] Peptides, compositions and/or pharmaceutical compositions of the invention may be in the form of nanoparticles, hydrogels, creams, ointments and/or wafers, for example for topical application.

[0181] In some embodiments, the peptides, compositions and/or pharmaceutical compositions of the invention may be for use in water treatment to reduce (or remove) mycobacteria. For example, a water supply can be treated with a peptide, composition and/or pharmaceutical composition after decanting the water into a vessel; and/or a filter could be applied to a water system that treats water passing through said filter, wherein the filter comprises a peptide, composition and/or pharmaceutical composition of the invention.

[0182] In some embodiments, the peptides and/or compositions described herein are for use in medicine, including veterinary medicine.

[0183] In some embodiments, the peptides and/or compositions described herein are for cosmetic purposes. For example, the peptides and/or compositions described herein may be prepared as a cosmetic. Such a cosmetic preparation may be in a formulation as described for compositions herein, including being suitable for any administration route as described herein. For example, a cosmetic composition may have activity against Propionibacterium acnes, and thus may be useful in treating acne.

[0184] In some embodiments, the peptides and/or compositions described herein may be components within a kit. A kit may further comprise instructions for use and/or constitution of peptides and/or composition.

[0185] In some embodiments, the peptides and/or compositions described herein may be for use in a diagnostic test, for example a diagnostic test for identifying mycobacterial infection. Diagnostic tests may be on a sample derived from a subject or on inanimate objects.

[0186] In some embodiments, the peptides and/or compositions described herein may be for use in the preparation of vaccines for use in treating or preventing disease in an organism, for example in a human, sheep, cow, dog, pig, or other farm animal. Alternatively, the vaccine may be prepared from a nucleic acid that encodes a peptide (or peptides) as described herein.

[0187] In some embodiments, the peptides and/or compositions described herein may be for use in:
[0188] 1. promoting wound healing;
[0189] 2. treating infection, optionally wherein the infection is by a bacterium with mycolic acids in their cell wall, for example mycobacterial infection, such as M. abscessus, or when the infection is caused by non-tuberculous mycobacteria (NTM);
[0190] 3. treating skin/oral/dental infections
[0191] 4. ocular, skin, soft tissue, oral and/or dental procedures;
[0192] 5. sterilisation (e.g. sterilisation via biocidal activity, wherein the peptide is acting as a biocide);
[0193] 6. treating granulomas and/or
[0194] 7. treating biofilms.

[0195] For example, in one embodiment the peptides and/or compositions described herein may be used for treating a skin or soft tissue infection caused by non-tuberculosis mycobacteria (NTM).

[0196] As described above, in one embodiment, the peptides and/or compositions of the invention may be used in treating tuberculosis (TB). In one embodiment the tuberculosis to be treated may be active. In one embodiment the tuberculosis to be treated may be latent (or dormant) tuberculosis.

[0197] The treatment of “infection” as described herein may refer to an external and/or internal infection, and instances where co-infection of one pathogen may be more likely due to infection with an initial pathogen. For example, the infection may be internal to a subject in need of treatment, e.g. a patient with M. abscessus infection. Additionally, or alternatively, the infection may be on an external object, such as an object suspected or confirmed to be infected with M. abscessus and so in need of sterilisation from said infection.

[0198] By “biofilm” we mean any group of microorganisms in which cells stick to each other on a surface, such as in a complex structure, thereby forming a biofilm. For example, the culture (or natural growth) of mycobacteria may result in a biofilm forming, whereby many mycobacterial cells are stuck together on a surface. In some embodiments, the peptides are capable of breaking up biofilms. For example, the peptides may disrupt the interactions between mycobacterial cells that have formed a biofilm, and/or may prevent new formation of biofilms from existing mycobacteria on a surface (e.g. by pre-sterilising with peptides).

[0199] Formation of a biofilm begins with the attachment of free-floating microorganisms (e.g. mycobacteria) to a surface. These first colonists adhere to the surface initially through weak, reversible adhesion and, if not immediately separated from the surface, can anchor more permanently using cell adhesion structures (such as pili). Some species are not able to attach to a surface on their own but are sometimes able to anchor themselves to the matrix or directly to earlier colonists. Once colonization has begun, the biofilm grows through a combination of cell division and recruitment. Polysaccharide matrices typically enclose bacterial biofilms. The final stage of biofilm formation is known as dispersion and is the stage in which the biofilm is established and may only change in shape and size.

[0200] In one embodiment, a biofilm may comprise, consist essentially of, or consist of, multiple strains of microbial cells (e.g. mycobacterial cells) growing in a biofilm. Optionally, a biofilm may comprise, consist essentially of, or consist of, one species or strain of microbial (e.g. mycobacterial) cells.

[0201] In an alternative option, a biofilm may comprise, consist essentially of, or consist of, more than one species or strains of mycobacterial cell, such as up to at least 2, 3, 4, 5, 6, 7, 8, 9, 10, 15, 20, 30, 40, 50, 60 70, 80, 90, 100, 150, 200, 250, 300, 350, 400, 450, 500, 600, 700, 800, 900, 1000 or more different species or strains of mycobacterial cell.

[0202] Accordingly, peptides, compositions and methods for inhibiting, reducing, or removing biofilm forming mycobacteria and mycobacterial infections are provided. In some embodiments, peptides or composition may further comprise an extra enzyme that is a biofilm degrader. For example, a biofilm degrader may be selected from the group consisting of depolymerases, glycoside hydrolases, lipases, esterases, nucleases and proteases. In some embodiments, a method for inhibiting, reducing or removing biofilm forming mycobacteria may comprise the step of treating a surface with a peptide or composition described herein, optionally further comprising the step of treating with an enzyme that is a biofilm degrader (sequentially, simultaneously and/or subsequently to the peptide or composition).

[0203] It will be apparent to the skilled person that as the invention provides peptides, the invention also provides corresponding polynucleotides that comprise or consist of a sequence that encodes the peptides of the invention (or domains thereof which are subsequently fused to a peptide of the present invention). The invention provides a DNA polynucleotide that comprises or consists of a sequence that encodes at least one peptide of the invention or at least one domain thereof. The invention also provides an RNA polynucleotide that comprises or consists of a sequence that encodes at least one peptide of the invention or at least one domain thereof. The skilled person will appreciate that a polynucleotide, for example a DNA or RNA polynucleotide, may comprise one or more modifications, for example a phosphorothioate modification. The polynucleotide may also comprise one or more other features, for example a promoter, terminator, or a tag for instance, for example the features typical of an expression cassette.

[0204] Nucleic acids of the present invention may not correspond to mycobacteriophage lysis cassettes. Mycobacteriophage lysis cassettes encode a single LysA or LysB. Some mycobacteriophages do not have lysis cassettes that encode a LysB. However, lysis cassettes capable of encoding a peptide comprising at least one LysA (or component thereof) and at least one LysB (or component thereof) do not exist in nature, let alone a peptide further comprising a membrane permeabiliser domain. Similarly, mycobacteriophages that product LysA and LysB peptides do so as separate peptides, and not combined in the way of the peptides of the present invention.

[0205] The invention also provides a nucleic acid vector comprising the nucleic acid of the invention. The skilled person will understand that by nucleic acid vector we include the meaning of a plasmid, phage, artificial chromosome or other nucleic acid structure used to deliver or express at least one peptide or at least one domain thereof. The artificial chromosome may be any artificial chromosome and may be selected from, for example, a bacterial artificial chromosome (BAC), a yeast artificial chromosome (YAC), and a Human artificial chromosome (HAC).

[0206] The invention also provides a cell that comprises at least one peptide of the invention (or at least one domain thereof), at least one polynucleotide of the invention and/or at least one vector of the invention. The cell of the invention has two main uses, amongst others: i) manufacture of the cyclic peptides or viral vectors comprising at least one peptide of the invention, for example; and ii) medical uses for example screening for suitable peptides for particular situations, or as a therapeutic cell.

[0207] In one embodiment, the cell is a cell that is used in the commercial, large scale manufacture of the peptides of the invention, for example is a bacterial cell such as E. coli, or is a yeast cell such as P. pastoris, or a cell derived from a plant, virus, insect or otherwise.

[0208] In another embodiment the cell is a cell that either is a direct “diseased” cell, for example taken from a biopsy from a patient. In another embodiment the cell is a cell that is intended to mimic or model a particular disease state. Such cells can be used to screen for appropriate peptides that are suitable for use in particular therapeutic situations.

[0209] Since the peptides of the invention are able to disrupt particular microbial cell walls, for example mycobacterial cell walls, it will be apparent to the skilled person that the peptides of the invention, the polynucleotides of the invention and/or the vectors of the invention have use in the treatment and/or prevention of diseases, disorders or conditions. For example, in one embodiment the peptides of the invention are useful in the treatment or prevention of a disease, disorder or condition that is associated with and/or caused by bacterial, for example mycobacterial, infection.

[0210] The peptides and/or compositions of the present invention may be for use in a method (e.g. an in vitro method) of lysing and/or killing bacteria (e.g. mycobacteria), and/or in a method of reducing the growth and/or viability of said bacteria.

[0211] In some embodiments is provided a method (e.g. an in vitro method) of lysing and/or killing bacteria (e.g. mycobacteria), and/or in a method of reducing the growth and/or viability of said bacteria, with any one or more of the previously described embodiments (e.g. peptides and/or compositions described herein).

[0212] Lysing and/or killing bacteria (e.g. mycobacteria) and/or reducing the growth and/or viability of bacteria may be assessed, for example, based on percentage growth inhibition.

[0213] The percentage growth inhibition can be calculated following an assessment of optical density using methods known to the skilled person and as demonstrated in the Examples, wherein a lower optical density may indicate a lower level of bacteria. Thus, in some embodiments, the peptide may have a percentage growth inhibition of at least 50%, 60%, 70%, 80%, 85%, 90%, 95%, 96%, 97%, 98%, 99%, or of 100%. Preferably, the peptides have a percentage growth inhibition of at least 90%; more preferably at least 95%. For further details of percentage growth inhibition measurements, see Tenland et al., 2018.

[0214] Alternatively, or additionally, the reduction in growth or lysing/killing of bacteria may be measured according to a scaled scoring system. In one embodiment of such a scoring system, different scores from ‘+++’, ‘+’, ‘+’ and ‘−’ are assigned, wherein ‘+++’ is indicative of the most bacterial growth inhibition, and ‘−’ is indicative of the lowest level of inhibition, or no level of growth inhibition. In one embodiment, assessment is based on OD655 nm values (representative of bacterial growth in a plate) as follows: hits are ranked as ‘+++’ if no bacterial growth was observed; hits are ranked as ‘++’ if they exhibit bacterial growth with OD655 nm between 0 and 0.1; hits are ranked as ‘+’ if they exhibit bacterial growth with OD655 nm between 0.1 and 0.2; and finally hits are ranked as ‘-’ if they exhibit bacterial growth with OD655 nm larger than 0.2. The OD655 nm values can be corrected for background OD655 nm of the medium. For further details of such a scoring system see Gerstmans et al., 2020. Thus in one embodiment the peptides of the invention may be described as being capable of lysing/killing bacteria if they are classed as ‘+++’, or alternatively the peptides may be described as being capable of lysing/killing bacteria if they are classed as ‘+++’ or ‘++’, or alternatively the peptides may be described as being capable of lysing/killing bacteria if they are classed as ‘+++’, ‘+’ or ‘+’.

[0215] Peptides may be classed as ‘hits’ i.e. peptides having a predefined level of bacterial killing activity, if the OD of bacterial growth in a plate is less than 0.1, as described above and further in the Examples of the present application. Alternatively, peptides may be classed as hits if the OD is less than 0.15, 0.20, 0.25, 0.30, 0.35, 0.40, 0.45 or 0.50.

[0216] Such bacterial growth inhibition may also be measured relative to a positive control (e.g. a plate well wherein the bacteria is allowed to grow without application of the peptides of the invention). Accordingly, any clones expressing measurable inhibition (i.e. significantly lower OD than the control) may be classed as having bacterial killing/lysing/growth inhibition effect.

[0217] Accordingly, the present application also provides aspects according to the following numbered paragraphs.
[0218] 1. A peptide comprising:
   [0219] (i) a first domain with activity specific to a peptidoglycan or component thereof, and
   [0220] (ii) a second domain with activity specific to an ester linkage; and
   [0221] (iii) a third domain with membrane permeabilising, destabilizing and/or disrupting activity.
[0222] 2. The peptide according to paragraph 1, further comprising a fourth domain that is at least one protein transduction domain (PTD).
[0223] 3. The peptide according to paragraph 1 or 2, wherein the first domain is a lysin, optionally an endolysin; a lysozyme; and/or an autolysin.
[0224] 4. The peptide according to paragraph 3, wherein the endolysin is selected from the group consisting of structural endolysins, modular endolysins, globular endolysins.
[0225] 5. The peptide according to paragraph 3 or 4, wherein the endolysin is a peptidoglycan hydrolase enzyme.
[0226] 6. The peptide according to any preceding paragraph, wherein the first domain is a LysA and/or at least one portion thereof, optionally wherein the portion thereof is at least one enzymatically active domain (EAD).
[0227] 7. The peptide according to any preceding paragraph, wherein the first domain comprises or consists of an amino sequence selected from any one of SEQ ID NOS: 2, 4, 6, 8, 10, 12, 14 or 326 to 338, or a variant, fragment, derivative or fusion thereof, or fusions of said fragments, variants and derivatives thereof, which retain the activity specific to peptidoglycan,
   [0228] or wherein the first domain is encoded by a nucleotide sequence selected from any one of SEQ ID NOs: 1, 3, 5, 7, 9, 11 and 13, or 313 to 325.
[0229] 8. The peptide according to any preceding paragraph, wherein the second domain is specific to the ester linkage between mycolic acid and arabinogalactan; or between mycolic acid and trehalose or between arabinogalactan and peptidoglycan.
[0230] 9. The peptide according to any preceding paragraph, wherein the second domain is derived from alpha/beta hydrolases, such as esterases, lipases and/or cutinases.
[0231] 10. The peptide according to any preceding paragraph, wherein the second domain is a mycolyl arabinogalactan esterase and/or a mycolyl-arabinogalactan-peptidoglycan (mAGP) hydrolase.
[0232] 11. The peptide according to any preceding paragraph, wherein the second domain is a LysB and/or at least one portion thereof, optionally wherein the portion thereof is at least one enzymatically active domain (EAD).
[0233] 12. The peptide according to any preceding paragraph, wherein the second domain comprises or consists of an amino sequence selected from any one of SEQ ID NOs: 16, 18, 20, 22, 24, 26, 28, 30 or 32, or a variant, fragment, derivative or fusion thereof, or fusions of said fragments, variants and derivatives thereof, which retain the activity specific to peptidoglycan,
   [0234] or wherein the first domain is encoded by a nucleotide sequence selected from any one of SEQ ID NOs: 15, 17, 19, 21, 23, 25, 27, 29 or 31.
[0235] 13. The peptide according to any preceding paragraph, wherein the first domain is LysA or a portion thereof and/or the second domain is LysB or a portion thereof,
   [0236] optionally wherein the LysA and/or LysB comprise a cell wall binding domain (CBD).
[0237] 14. The peptide according to any preceding paragraph, wherein the first domain is LysA or a portion thereof and comprises a cell wall binding domain (CBD) that is specific to the bacterial target of interest, optionally wherein the CBD is not specific to the cell walls of gram positive and/or gram negative bacteria, preferably wherein the CBD is specific to mycobacterial cell walls.
[0238] 15. The peptide according to any preceding paragraph, wherein the peptide comprises multiple domains corresponding to a first domain, second domain, third domain, and/or fourth domain; optionally wherein the multiple domains are:
   [0239] (i) repeats of the same domain;
   [0240] (ii) different domains but with the same type of activity;
   [0241] (iii) derived from the same source (for example, all domains may be from the same organism);
   [0242] (iv) derived from different sources (for example, any one or more of the domains may be from a different organism to any other domain).
[0243] 16. The peptide according to any preceding paragraph, wherein the third domain with membrane permeabilising, destabilizing and/or disrupting activity is an antimicrobial peptide (AMP) or portion thereof and/or a holin or portion thereof,
   [0244] optionally wherein the AMP or a portion thereof is cationic, polycationic, hydrophobic, amphipathic, synthetic or natural or any combination thereof (or comprises portions that are cationic, etc, or any combination thereof).
[0245] 17. The peptide according to any preceding paragraph, wherein the second domain comprises or consists of an amino sequence selected from any one of SEQ ID NOs: 16, 18, 20, 22, 24, 26, 28, 30 or 32, or a variant, fragment, derivative or fusion thereof, or fusions of said fragments, variants and derivatives thereof, which retain the activity specific to peptidoglycan,
   [0246] or wherein the first domain is encoded by a nucleotide sequence selected from any one of SEQ ID NOs: 15, 17, 19, 21, 23, 25, 27, 29 or 31.
[0247] 18. The peptide according to any preceding paragraph, wherein the domains are in the following order (N- to C-terminal):
   [0248] (a) at least one third domain—at least one second domain—at least one first domain;
   [0249] (b) at least one third domain—at least one first domain—at least one second domain;
   [0250] (c) at least one first domain—at least one second domain—at least one third domain;
   [0251] (d) at least one second domain—at least one first domain—at least one third domain;
   [0252] (e) at least one first domain—at least one third domain—at least one second domain;
   [0253] (f) at least one second domain—at least one third domain—at least one first domain;
      [0254] optionally wherein any of the peptides (or further, alternative configurations) further comprises at least one PTD and/or at least one linker, wherein the PTD and/or linker is at the N-terminus, C-terminus and/or between any of the domains.
[0255] 19. The peptide according to any preceding paragraph, wherein the peptide further comprises at least one linker peptide, wherein the linker peptide connects:
   [0256] (i) the first domain to the second domain;
   [0257] (ii) the second domain to the third domain;
   [0258] (iii) the first domain to the third domain; and/or
   [0259] optionally wherein at least one linker comprises an amino acid sequence
   [0260] selected from SEQ ID NOs: 104, 106, 108, 110, 112 or 114;
   [0261] optionally wherein the length of the linker is between 1 amino acid and about 10 amino acids, and/or not in excess of 100 amino acids.
[0262] 20. The peptide according to any preceding paragraph, wherein the first domain and/or second domain comprises a domain with a mechanism of action selected from the group consisting of amidase, transglycosylase, muramidase and/or peptidase, N-acetylmuramoyl-L-alanine amidase, Amidases in general including all families, D-Alanine-meso-Diaminopimelic (DD) endopeptidase, c-D-glutamyl-meso-diaminopimelic acid (DL) peptidase, Endopeptidases in general including all families, lytic transglycosylases, N-acetylmuramidase, lysozyme, Chitinase, L-alanoyl-D-glutamate (LD) endopeptidase, m-DAP-m-DAP (LD) endopeptidase in general, D-alanyl-D-alanine carboxypeptidase, Glycoside hydrolases in general including all families, L-Alanine-D-Glutamate peptidase, cysteine protease and N-acetyl-β-D-glucosaminidase, carboxypeptidase, glycosidase (glucosaminidases), transpeptidases, epimerase, Y-D-glutamyl-meso-diaminopimelic acid (DL) peptidases, and/or combinations thereof.
[0263] 21. The peptide according to any preceding paragraph, wherein any one or more of the domains are effective against the phylum Actinobacteria; derived from the class Actinobacteridae; derived from the order Actinomycetales, and/or Bifidobacteriales. Optionally wherein at least one lysin is derived from a subclass and/or family selected from the list consisting of: Actinomycineae: Actinomycetaceae (Actinomyces, Mobiluncus); Corynebacterineae: Mycobacteriaceae (Mycobacterium), Nocardiaceae; Frankineae: Frankiaceae; Micrococcineae: Brevibacteriaceae; Propionibacteriaceae (Propionibacterium); Bifidobacteriaceae (Bifidobacterium, Falcivibrio, Gardnerella); Acidimicrobidae, Coriobacteridae, Rubrobacteridae, Sphaerobacteridae.
[0264] 22. The peptide according to any preceding paragraph, wherein any one or more of the domains are effective against Mycobacterium selected from the group consisting of: Mycobacterium tuberculosis, Mycobacterium microti, Mycobacterium africanum, Mycobacterium bovis, Mycobacterium canettii, Mycobacterium pinnipedii, Mycobacterium caprae, Mycobacterium mungi, Mycobacterium leprae, Mycobacterium ulcerans, Mycobacterium xenopi, Mycobacterium shottsii, Mycobacterium avium, Mycobacterium avium subsp. paratuberculosis, Mycobacterium paratuberculosis, Mycobacterium intracellulare, Mycobacterium smegmatis, Mycobacterium abscessus, Mycobacterium kansasii, Mycobacterium terrae, Mycobacterium nonchromogenicum, Mycobacterium gordonae, and Mycobacterium triviale, and non-tuberculosis mycobacteria (NTM).
[0265] 23. The peptide according to any preceding paragraph, wherein any one or more of the domains are derived from at least one mycobacteriophage, optionally wherein the mycobacteriophage is selected from the group consisting of: TM4, D29, L5, Bxz2, Saal, Enkosi, Ms6, Omega, Obama12, Echild, DS6A, Pumpkin or any other mycobacteriophage as listed in The Actinobacteriophage Database.
[0266] 24. The peptide according to any preceding paragraph, wherein any one or more of the domains are a mutant, variant or wildtype domain.
[0267] 25. The peptide according to any preceding paragraph, wherein at least one of the domains is a mutant or variant that comprises at least 10%, 20%, 30%, 40%, 50%, 60%, 70%, 80%, 90%, 95%, 96%, 97%, 98%, 99% or 100% of a wildtype sequence, optionally wherein the mutant or variant retains substantially the same level of activity of the wildtype domain.
[0268] 26. A composition comprising a peptide as defined by any preceding paragraph, optionally wherein the composition comprises one or more further agents (e.g. pharmaceutically acceptable excipients).
[0269] 27. The peptide according to any preceding paragraph for use in medicine, including veterinary medicine.
[0270] 28. The peptide according to any preceding paragraph for use in targeting a cell envelope comprising:
   [0271] (i) an outer leaflet and inner leaflet;
   [0272] (ii) an arabinogalactan layer;
   [0273] (iii) a mycolic acid layer;
   [0274] (iv) a peptidoglycan layer;
   [0275] (v) a periplasmic space;
   [0276] (vi) a granular layer; and/or
   [0277] (vii) an inner membrane.
[0278] 29. The peptide according to any preceding paragraph for use in:
   [0279] (i) promoting wound healing
   [0280] (ii) treating infection, optionally wherein the infection is mycobacterial infection or when the infection is caused by non-tuberculous mycobacteria (NTM)
   [0281] (iii) treating active tuberculosis and/or latent tuberculosis;
   [0282] (iv) treating respiratory, ocular, skin, oral and/or dental infections;
   [0283] (v) ocular, skin, oral and/or dental procedures;
   [0284] (vi) sterilisation (e.g. sterilisation via biocidal activity, wherein the peptide is acting as a biocide);
   [0285] (vii) treating granulomas; and/or
   [0286] (viii) treating biofilms.
[0287] 30. The peptide, composition, and/or use of any preceding paragraph, wherein the bacterium (such as the mycobacterium) is resistant to at least one drug, optionally at least 2, 3, 4, 5, 6, 7, 8, 9, 10 or more drugs; and/or is classified as multidrug-resistant (MDR), extremely drug-resistant (XDR), or totally drug-resistant (TDR).
[0288] 31. A polynucleotide comprising a nucleic acid encoding the peptide according to any preceding paragraph.
[0289] 32. A vector comprising a peptide according to any preceding paragraph, and/or the nucleic acid according to paragraph 31.
[0290] 33. A cell comprising a peptide according to any preceding paragraph, the nucleic acid according to paragraph 31, and/or the vector according to paragraph 32.
[0291] 34. The peptide or composition for use of any preceding paragraph, wherein the peptide/composition is used in combination with at least one additional therapeutic agent, optionally wherein the additional therapeutic agent is one or more anti-mycobacterial agent, such as a mycobacterial chemotherapeutic.
[0292] 35. An in vitro method of lysing, killing, reducing growth of, and/or reducing viability of mycobacteria, wherein the method comprises administering a peptide according to any preceding paragraph.
[0293] 36. A (medical) device comprising a peptide according to any preceding paragraph.
[0294] 37. A kit comprising an agent according to any preceding paragraph, optionally wherein the kit further comprises instructions for use.
[0295] 38. A peptide, composition, use of a peptide or composition, a method of treatment or diagnosis, or a kit substantially as defined herein with reference to the description.

### FIGURE LEGENDS

[0296] FIG. 1: Schematic structure of mycobacterial cell envelope showing the target sites for Antimicrobial peptides (AMPs) acting on the inner and outer membranes, LysB enzymes hydrolyzing the ester bond that connects mycolic acid to the arabinogalactan-peptidoglycan and LysA enzymes that hydrolyze the peptidoglycan layer of the cell wall (Vincent et al., 2018).

[0297] FIG. 2: SDS-PAGE of some clones of the constructed library 1 expressed in LB medium, at 16° C. for 72 hr. L1: Molecular weight ladder (Allblue). L2: Clone 1A7 soluble fraction (MW: 53 kDa). L3: Clone 1A7 insoluble fraction (MW: 53 kDa). L4: Clone 1A11 Soluble fraction. L5: Clone 1A11 insoluble fraction (MW: 50 kDa). L6: Clone 1B4 Soluble fraction (MW: 95 kDa). L7: Clone 1B4 insoluble fraction (MW: 95 kDa). L8: Clone 1B6 Soluble fraction (MW: 50 kDa). L9: Clone 1B6 insoluble fraction (MW: 50 kDa). L10: Clone 1B7 soluble fraction (MW: 97 kDa). L11: Clone 1B7 Insoluble fraction (MW: 97 kDa). L12: Clone 1B7 LB medium supernatant (MW: 97 kDa). L13: Clone 1B8 Soluble fraction (MW: 100 kDa). L14: Clone 1B8 insoluble fraction (MW: 100 kDa). L15: Clone 1A11 LB medium supernatant (MW: 50 kDa).

[0298] FIG. 3: Optical density (OD_{625 nm}) of microtiter plate of Mycobacterium smegmatis 10⁸ CFU/ml after 24 hours incubation at 37° C. Fifty microliters of clarified cell lysate prepared from library 1 (AMP-LysB-Linker-LysA) were mixed with 50 μl of M. smegmatis with inoculum size of 10⁸ CFU/ml. A1-H12 represents the positions of different constructs from the library within a 96-well plate. Wells with OD<0.1, indicating strong antibacterial activity, are marked with black colour and hit rate is the percentage of wells having OD<0.1. Positive control (OD_{625 nm}=1.3).

[0299] FIG. 4: Optical density (OD_{625 nm}) of microtiter plate of Mycobacterium smegmatis 10⁸ CFU/ml after 24 hours incubation at 37° C. Fifty microliters of clarified cell lysate prepared from library 2 (AMP-LysB-Linker-EAD) were mixed with 50 μl of M. smegmatis with inoculum size of 10⁸ CFU/ml. A1-H12 represents the positions of different constructs from the library within a 96-well plate. Wells with OD<0.1, indicating strong antibacterial activity, are marked with black colour and hit rate is the percentage of wells having OD<0.1. Positive control (OD_{625 nm}=1.3).

[0300] FIG. 5: Optical density (OD_{625 nm}) of microtiter plate of Mycobacterium smegmatis 10⁸ CFU/ml after 24 hours incubation at 37° C. Fifty microliters of clarified cell lysate prepared from library 3 (AMP-LysB-Linker-LysA-PTD) were mixed with 50 μl of M. smegmatis with inoculum size of 10⁸ CFU/ml. A1-D10 (i.e. A1-A12, B1-B12, C1-C12 and D1-D10) represents the positions of different constructs from the library within a 96-well plate. Wells with OD<0.1, indicating strong antibacterial activity, are marked with black colour and hit rate is the percentage of wells having OD<0.1. Positive control (OD_{625 nm}=1.3).

[0301] FIG. 6: Optical density (OD_{625 nm}) of microtiter plate of Nocardia iowensis 10⁸ CFU/ml after 24 hours incubation at 37° C. Fifty microliters of clarified cell lysate prepared from library 1 (AMP-LysB-Linker-LysA) were mixed with 50 μl of Nocardia iowensis with inoculum size of 10⁸ CFU/ml. A1-H12 represents the positions of different constructs from the library within a 96-well plate. Wells with OD<0.1, indicating strong antibacterial activity, are marked with black colour and hit rate is the percentage of wells having OD<0.1. Positive control (OD_{625 nm}=0.65).

[0302] FIG. 7: Optical density (OD_{625 nm}) of microtiter plate of Nocardia iowensis 10⁸ CFU/ml after 24 hours incubation at 37° C. Fifty microliters of clarified cell lysate prepared from library 2 (AMP-LysB-Linker-EAD) were mixed with 50 μl of Nocardia iowensis with inoculum size of 10⁸ CFU/ml. A1-H12 represents the positions of different constructs from the library within a 96-well plate. Wells with OD<0.1, indicating strong antibacterial activity, are marked with black colour and hit rate is the percentage of wells having OD<0.1. Positive control (OD_{625 nm}=0.65).

[0303] FIG. 8: Optical density (OD_{625 nm}) of microtiter plate of Nocardia iowensis 10⁸ CFU/ml after 24 hours incubation at 37° C. Fifty microliters of clarified cell lysate prepared from library 3 (AMP-LysB-Linker-LysA-PTD) were mixed with 50 μl of Nocardia iowensis with inoculum size of 10⁸ CFU/ml. A1-D10 (i.e. A1-A12, B1-B12, C1-C12 and D1-D10) represents the positions of different constructs from the library within a 96-well plate. Wells with OD<0.1, indicating strong antibacterial activity, are marked with black colour and hit rate is the percentage of wells having OD<0.1. Positive control (OD_{625 nm}=0.65).

[0304] FIG. 9: Optical density (OD_{625 nm}) of microtiter plate of Rhodococcus erythropolis 108 CFU/ml after 24 hours incubation at 37° C. Fifty microliters of clarified cell lysate prepared from library 1 (AMP-LysB-Linker-LysA) were mixed with 50 μl of Rhodococcus erythropolis 108 with inoculum size of 10⁸ CFU/ml. A1-H12 represents the positions of different constructs from the library within a 96-well plate. Wells with OD<0.1, indicating strong antibacterial activity, are marked with black colour and hit rate is the percentage of wells having OD<0.1. Positive control (OD_{625 nm}=0.43).

[0305] FIG. 10: Optical density (OD_{625 nm}) of microtiter plate of Rhodococcus erythropolis 108 CFU/ml after 24 hours incubation at 37° C. Fifty microliters of clarified cell lysate prepared from library 2 (AMP-LysB-Linker-EAD) were mixed with 50 μl of Rhodococcus erythropolis 108 with inoculum size of 10⁸ CFU/ml. A1-H12 represents the positions of different constructs from the library within a 96-well plate. Wells with OD<0.1, indicating strong antibacterial activity, are marked with black colour and hit rate is the percentage of wells having OD<0.1. Positive control (OD_{625 nm}=0.43).

[0306] FIG. 11: Optical density (OD_{625 nm}) of microtiter plate of Rhodococcus erythropolis 108 CFU/ml after 24 hours incubation at 37° C. Fifty microliters of clarified cell lysate prepared from library 3 (AMP-LysB-Linker-LysA-PTD) were mixed with 50 μl of Rhodococcus erythropolis 108 with inoculum size of 10⁸ CFU/ml. A1-D10 (i.e. A1-A12, B1-B12, C1-C12 and D1-D10) represents the positions of different constructs from the library within a 96-well plate. Wells with OD<0.1, indicating strong antibacterial activity, are marked with black colour and hit rate is the percentage of wells having OD<0.1. Positive control (OD_{625 nm}=0.43).

[0307] FIG. 12: Percentage killing efficiency of 50 μl of clarified cell lysate prepared from library 1 (AMP-LysB-Linker-LysA) mixed with 50 μl of Mycobacterium bovis BCG strain with inoculum size of 106 CFU/ml after 24 hours incubation at 37° C. A1-H12 represents the positions of different constructs from the library within a 96-well plate.

[0308] FIG. 13: Percentage killing efficiency of 50 μl of clarified cell lysate prepared from library 2 (AMP-LysB-Linker-EAD) mixed with 50 μl of Mycobacterium bovis BCG strain with inoculum size of 106 CFU/ml after 24 hours incubation at 37° C. A1-H12 represents the positions of different constructs from the library within a 96-well plate.

[0309] FIG. 14: Percentage killing efficiency of 50 μl of clarified cell lysate prepared from library 3 (AMP-LysB-Linker-LysA-PTD) mixed with 50 μl of Mycobacterium bovis BCG strain with inoculum size of 106 CFU/ml after 24 hours incubation at 37° C. A1-D10 (i.e. A1-A12, B1-B12, C1-C12 and D1-D10) represents the positions of different constructs from the library within a 96-well plate.

[0310] FIG. 15: Percentage killing efficiency of 50 μl of clarified cell lysate prepared from library 1 (AMP-LysB-Linker-LysA) mixed with 50 μl of Mycobacterium abscessus with inoculum size of 10⁷ CFU/ml after 24 hours incubation at 37° C. A1-H12 represents the positions of different constructs from the library within a 96-well plate.

[0311] FIG. 16: Percentage killing efficiency of 50 μl of clarified cell lysate prepared from library 2 (AMP-LysB-Linker-EAD) mixed with 50 μl of Mycobacterium abscessus with inoculum size of 10⁷ CFU/ml after 24 hours incubation at 37° C. A1-H12 represents the positions of different constructs from the library within a 96-well plate.

[0312] FIG. 17: Percentage killing efficiency of 50 μl of clarified cell lysate prepared from library 3 (AMP-LysB-Linker-LysA-PTD) mixed with 50 μl of Mycobacterium abscessus with inoculum size of 10⁷ CFU/ml after 24 hours incubation at 37° C. A1-D10 (i.e. A1-A12, B1-B12, C1-C12 and D1-D10) represents the positions of different constructs from the library within a 96-well plate.

[0313] FIG. 18: Optical density (OD_{625 nm}) of microtiter plate of Mycobacterium smegmatis 10⁸ CFU/ml after 24 hours incubation at 37° C. Fifty microliters of clarified cell lysate prepared from library 4 (AMP-LysB) were mixed with 50 μl of M. smegmatis with inoculum size of 10⁸ CFU/ml. A1-H12 represents the positions of different constructs from the library within a 96-well plate. Wells with OD<0.1, indicating strong antibacterial activity, are marked with black colour and hit rate is the percentage of wells having OD<0.1. Positive control (OD_{625 nm}=1.3).

[0314] FIG. 19: Optical density (OD_{625 nm}) of microtiter plate of Mycobacterium smegmatis 10⁸ CFU/ml after 24 hours incubation at 37° C. Fifty microliters of clarified cell lysate prepared from library 5 (AMP-Linker-LysB) were mixed with 50 μl of M. smegmatis with inoculum size of 10⁸ CFU/ml. A1-H12 represents the positions of different constructs from the library within a 96-well plate. Wells with OD<0.1, indicating strong antibacterial activity, are marked with black colour and hit rate is the percentage of wells having OD<0.1. Positive control (OD_{625 nm}=1.3).

[0315] FIG. 20: Optical density (OD_{625 nm}) of microtiter plate of Mycobacterium smegmatis 10⁸ CFU/ml after 24 hours incubation at 37° C. Fifty microliters of clarified cell lysate prepared from library 6 (AMP-LysA) were mixed with 50 μl of M. smegmatis with inoculum size of 10⁸ CFU/ml. A1-H12 represents the positions of different constructs from the library within a 96-well plate. Wells with OD<0.1, indicating strong antibacterial activity, are marked with black colour and hit rate is the percentage of wells having OD<0.1. Positive control (OD_{625 nm}=1.3).

[0316] FIG. 21: Optical density (OD_{625 nm}) of microtiter plate of Mycobacterium smegmatis 10⁸ CFU/ml after 24 hours incubation at 37° C. Fifty microliters of clarified cell lysate prepared from library 7 (AMP-Linker-LysA) were mixed with 50 μl of M. smegmatis with inoculum size of 10⁸ CFU/ml. A1-H12 represents the positions of different constructs from the library within a 96-well plate. Wells with OD<0.1, indicating strong antibacterial activity, are marked with black colour and hit rate is the percentage of wells having OD<0.1. Positive control (OD_{625 nm}=1.3).

[0317] FIG. 22: Optical density (OD_{625 nm}) of microtiter plate of Mycobacterium smegmatis 10⁸ CFU/ml after 24 hours incubation at 37° C. Fifty microliters of clarified cell lysate prepared from library 8 (AMP-EAD) were mixed with 50 μl of M. smegmatis with inoculum size of 10⁸ CFU/ml. A1-H12 represents the positions of different constructs from the library within a 96-well plate. Wells with OD<0.1, indicating strong antibacterial activity, are marked with black colour and hit rate is the percentage of wells having OD<0.1. Positive control (OD_{625 nm}=1.3).

[0318] FIG. 23: Optical density (OD_{625 nm}) of microtiter plate of Mycobacterium smegmatis 10⁸ CFU/ml after 24 hours incubation at 37° C. Fifty microliters of clarified cell lysate prepared from library 9 (AMP-Linker-EAD) were mixed with 50 μl of M. smegmatis with inoculum size of 10⁸ CFU/ml. A1-H12 represents the positions of different constructs from the library within a 96-well plate. Wells with OD<0.1, indicating strong antibacterial activity, are marked with black colour and hit rate is the percentage of wells having OD<0.1. Positive control (OD_{625 nm}=1.3).

[0319] FIG. 24: Optical density (OD_{625 nm}) of microtiter plate of Mycobacterium smegmatis 10⁵ CFU/ml after 24 hours incubation at 37° C. Fifty microliters of clarified cell lysate prepared from library 10 (LysB-Linker-LysA) were mixed with 50 μl of M. smegmatis with inoculum size of 10⁵ CFU/ml. A1-H12 represents the positions of different constructs from the library within a 96-well plate. Wells with OD<0.1, indicating strong antibacterial activity, are marked with black colour and hit rate is the percentage of wells having OD<0.1.

[0320] FIG. 25: Optical density (OD_{625 nm}) of microtiter plate of Mycobacterium smegmatis 10⁵ CFU/ml after 24 hours incubation at 37° C. Fifty microliters of clarified cell lysate prepared from library 11 (LysB-Linker-EADs) were mixed with 50 μl of M. smegmatis with inoculum size of 10⁵ CFU/ml. A1-H12 represents the positions of different constructs from the library within a 96-well plate. Wells with OD<0.1, indicating strong antibacterial activity, are marked with black colour and hit rate is the percentage of wells having OD<0.1.

[0321] FIG. 26: Optical density (OD_{625 nm}) of 50 μl Mycobacterium smegmatis 10⁵ CFU/ml mixed with 50 μl of clarified cell lysate prepared from LysB enzymes after 24 hours incubation at 37° C. Fifty microliters of Mueller-Hinton broth mixed with 50 μl M. smegmatis cells 10⁵ CFU/ml was considered as positive control (OD=0.4). Wells with OD<0.1, indicating strong antibacterial activity, are marked with black colour and hit rate is the percentage of wells having OD<0.1.

[0322] FIG. 27: Optical density (OD_{625 nm}) of 50 μl Mycobacterium smegmatis 10⁵ CFU/ml mixed with 50 μl of clarified cell lysate prepared from LysA enzymes after 24 hours incubation at 37° C. Fifty microliters of Mueller-Hinton broth mixed with 50 μl M. smegmatis cells 10⁵ CFU/ml was considered as positive control (OD=0.4). Wells with OD<0.1, indicating strong antibacterial activity, are marked with black colour and hit rate is the percentage of wells having OD<0.1.

[0323] FIG. 28: Optical density (OD_{625 nm}) of 50 μl Mycobacterium smegmatis 10⁵ CFU/ml mixed with 50 μl of clarified cell lysate prepared from some selected Enzyme Active Domains (EADs) after 24 hours incubation at 37° C. Fifty microliters of Mueller-Hinton broth mixed with 50 μl M. smegmatis cells 10⁵ CFU/ml was considered as positive control (OD=0.4). Wells with OD<0.1, indicating strong antibacterial activity, are marked with black colour and hit rate is the percentage of wells having OD<0.1.

[0324] FIG. 29: Optical density (OD_{625 nm}) of microtiter plate of E. coli 10⁸ CFU/ml after 24 hours incubation at 37° C. Fifty microliters of clarified cell lysate prepared from library 1 (AMP-LysB-Linker-LysA) were mixed with 50 μl of E. coli with inoculum size of 10⁸ CFU/ml. A1-H12 represents the positions of different constructs from the library within a 96-well plate. Wells with OD<0.1, indicating strong antibacterial activity, are marked with black colour and hit rate is the percentage of wells having OD<0.1. Positive control (OD_{625 nm}=1.4).

[0325] FIG. 30: Optical density (OD_{625 nm}) of microtiter plate of E. coli 10⁸ CFU/ml after 24 hours incubation at 37° C. Fifty microliters of clarified cell lysate prepared from library 2 (AMP-LysB-Linker-EAD) were mixed with 50 μl of E. coli with inoculum size of 10⁸ CFU/ml. A1-H12 represents the positions of different constructs from the library within a 96-well plate. Wells with OD<0.1, indicating strong antibacterial activity, are marked with black colour and hit rate is the percentage of wells having OD<0.1. Positive control (OD_{625 nm}=1.4).

[0326] FIG. 31: Optical density (OD_{625 nm}) of microtiter plate of E. coli 10⁸ CFU/ml after 24 hours incubation at 37° C. Fifty microliters of clarified cell lysate prepared from library 3 (AMP-LysB-Linker-LysA-PTD) were mixed with 50 μl of E. coli with inoculum size of 10⁸ CFU/ml. A1-D10 (i.e. A1-A12, B1-B12, C1-C12 and D1-D10) represents the positions of different constructs from the library within a 96-well plate. Wells with OD<0.1, indicating strong antibacterial activity, are marked with black colour and hit rate is the percentage of wells having OD<0.1. Positive control (OD_{625 nm}=1.4).

[0327] FIG. 32: Optical density (OD_{625 nm}) of microtiter plate of Mycobacterium smegmatis 10⁸ CFU/ml after 24 hours incubation at 37° C. Fifty microliters of clarified cell lysate prepared from library 12 (AMP-LysA-Linker-LysB) were mixed with 50 μl of M. smegmatis with inoculum size of 10⁸ CFU/ml. A1-H12 represents the positions of different constructs from the library within a 96-well plate. Wells with OD<0.1, indicating strong antibacterial activity, are marked with black colour and hit rate is the percentage of wells having OD<0.1. Positive control (OD_{625 nm}=1.3).

[0328] FIG. 33: Optical density (OD_{625 nm}) of microtiter plate of E. coli 10⁸ CFU/ml after 24 hours incubation at 37° C. Fifty microliters of clarified cell lysate prepared from library 12 (AMP-LysA-Linker-LysB) were mixed with 50 μl of E. coli with inoculum size of 10⁸ CFU/ml. A1-H12 represents the positions of different constructs from the library within a 96-well plate. Wells with OD<0.1, indicating strong antibacterial activity, are marked with black colour and hit rate is the percentage of wells having OD<0.1. Positive control (OD_{625 nm}=1.4).

[0329] FIG. 34: Optical density (OD_{625 nm}) of microtiter plate of Mycobacterium smegmatis 10⁸ CFU/ml after 24 hours incubation at 37° C. Fifty microliters of clarified cell lysate prepared from library 13 (AMP-EAD-Linker-LysB) were mixed with 50 μl of M. smegmatis with inoculum size of 10⁸ CFU/ml. A1-H12 represents the positions of different constructs from the library within a 96-well plate. Wells with OD<0.1, indicating strong antibacterial activity, are marked with black colour and hit rate is the percentage of wells having OD<0.1. Positive control (OD_{625 nm}=1.3).

[0330] FIG. 35: Optical density (OD_{625 nm}) of microtiter plate of E. coli 10⁸ CFU/ml after 24 hours incubation at 37° C. Fifty microliters of clarified cell lysate prepared from library 13 (AMP-EAD-Linker-LysB) were mixed with 50 μl of E. coli with inoculum size of 10⁸ CFU/ml. A1-H12 represents the positions of different constructs from the library within a 96-well plate. Wells with OD<0.1, indicating strong antibacterial activity, are marked with black colour and hit rate is the percentage of wells having OD<0.1. Positive control (OD_{625 nm}=1.4).

[0331] FIG. 36: Optical density (OD_{625 nm}) of microtiter plate of Mycobacterium smegmatis 10⁸ CFU/ml after 24 hours incubation at 37° C. Fifty microliters of clarified cell lysate prepared from library 14 (LysB-Linker-LysA-AMP) were mixed with 50 μl of M. smegmatis with inoculum size of 10⁸ CFU/ml. A1-H12 represents the positions of different constructs from the library within a 96-well plate. Wells with OD<0.1, indicating strong antibacterial activity, are marked with black colour and hit rate is the percentage of wells having OD<0.1. Positive control (OD_{625 nm}=1.3).

[0332] FIG. 37: Optical density (OD_{625 nm}) of microtiter plate of E. coli 10⁸ CFU/ml after 24 hours incubation at 37° C. Fifty microliters of clarified cell lysate prepared from library 14 (LysB-Linker-LysA-AMP) were mixed with 50 μl of E. coli with inoculum size of 10⁸ CFU/ml. A1-H12 represents the positions of different constructs from the library within a 96-well plate. Wells with OD<0.1, indicating strong antibacterial activity, are marked with black colour and hit rate is the percentage of wells having OD<0.1. Positive control (OD_{625 nm}=1.4).

[0333] FIG. 38: Optical density (OD_{625 nm}) of microtiter plate of Mycobacterium smegmatis 10⁸ CFU/ml after 24 hours incubation at 37° C. Fifty microliters of clarified cell lysate prepared from library 15 (LysA-Linker-LysB-AMP) were mixed with 50 μl of M. smegmatis with inoculum size of 10⁸ CFU/ml. A1-H12 represents the positions of different constructs from the library within a 96-well plate. Wells with OD<0.1, indicating strong antibacterial activity, are marked with black colour and hit rate is the percentage of wells having OD<0.1. Positive control (OD_{625 nm}=1.3).

[0334] FIG. 39: Optical density (OD_{625 nm}) of microtiter plate of E. coli 10⁸ CFU/ml after 24 hours incubation at 37° C. Fifty microliters of clarified cell lysate prepared from library 15 (LysA-Linker-LysB-AMP) were mixed with 50 μl of E. coli with inoculum size of 10⁸ CFU/ml. A1-H12 represents the positions of different constructs from the library within a 96-well plate. Wells with OD<0.1, indicating strong antibacterial activity, are marked with black colour and hit rate is the percentage of wells having OD<0.1. Positive control (OD_{625 nm}=1.4).

[0335] FIG. 40: Optical density (OD_{625 nm}) of microtiter plate of Mycobacterium smegmatis 10⁸ CFU/ml after 24 hours incubation at 37° C. Fifty microliters of clarified cell lysate prepared from library 16 (LysB-AMP-LysA) were mixed with 50 μl of M. smegmatis with inoculum size of 10⁸ CFU/ml. A1-H12 represents the positions of different constructs from the library within a 96-well plate. Wells with OD<0.1, indicating strong antibacterial activity, are marked with black colour and hit rate is the percentage of wells having OD<0.1. Positive control (OD_{625 nm}=1.3).

[0336] FIG. 41: Optical density (OD_{625 nm}) of microtiter plate of E. coli 10⁸ CFU/ml after 24 hours incubation at 37° C. Fifty microliters of clarified cell lysate prepared from library 16 (LysB-AMP-LysA) were mixed with 50 μl of E. coli with inoculum size of 10⁸ CFU/ml. A1-H12 represents the positions of different constructs from the library within a 96-well plate. Wells with OD<0.1, indicating strong antibacterial activity, are marked with black colour and hit rate is the percentage of wells having OD<0.1. Positive control (OD_{625 nm}=1.4).

[0337] FIG. 42: A comparison of the growth curve based on optical density (OD_{625 nm}) for various clones (AMP-LysB, AMP-LysA and 4D10) in LB medium. AMP=Ci-MAM-A24, LysB=D29, Linker=Linker 1, and LysA=TM4. 4D10 includes each component, culminating in [Ci-MAM-A24]-[D29]-[Linker]-[TM4]. Optical density positively correlates with expression levels, in that a higher optical density means a higher level of expression of the peptide. 4D10 shows considerably faster expression compared with both AMP-LysB and AMP-LysA.

[0338] FIG. 43: A comparison of the antimycobacterial activity against M. smegmatis for LysA alone; LysB alone; a mixture of LysA and LysB; AMP-LysA alone; AMP-LysB alone; a mixture of AMP-LysA and AMP-LysB; and AMP-LysB-Linker-LysA alone.

### REFERENCES

[0339] 1. Bhamidi, S., Scherman, M. S., Rithner, C. D., Prenni, J. E., Chatterjee, D., Khoo, K. H., McNeil, M. R. 2008. The identification and location of succinyl residues and the characterization of the interior arabinan region allow for a model of the complete primary structure of Mycobacterium tuberculosis mycolyl arabinogalactan. Journal of Biological Chemistry, 283 (19), 12992-13000.
[0340] 2. Brennan, P. J. 2003. Structure, function, and biogenesis of the cell wall of Mycobacterium tuberculosis. Tuberculosis, 83 (1-3), 91-97.
[0341] 3. Brennan, P. J., Nikaido, H. 1995. The Envelope of Mycobacteria. Annual Review of Biochemistry, 64, 29-63.
[0342] 4. Briers, Y., Walmagh, M., Van Puyenbroeck, V., Cornelissen, A., Cenens, W., Aertsen, A., Oliveira, H., Azeredo, J., Verween, G., Pirnay, J. P., Miller, S., Volckaert, G., Lavigne, R. 2014. Engineered Endolysin-Based “Artilysins” To Combat Multidrug-Resistant Gram-Negative Pathogens. Mbio, 5 (4).
[0343] 5. Cobb, R. E., Chao, R., Zhao, H. M. 2013. Directed Evolution: Past, Present, and Future. Aiche Journal, 59 (5), 1432-1440.
[0344] 6. Crameri, A., Raillard, S. A., Bermudez, E., Stemmer, W. P. C. 1998. DNA shuffling of a family of genes from diverse species accelerates directed evolution. Nature, 391 (6664), 288-291.
[0345] 7. Daffe, M. 2008. The Global Architecture of the Mycobacterial Cell Envelope. Mycobacterial Cell Envelope, 3-11.
[0346] 8. Daffe, M. 1996. Structure of the cell envelope of Mycobacterium tuberculosis. Medecine Et Maladies Infectieuses, 26 (11), 891-897.
[0347] 9. Engler, C., Gruetzner, R., Kandzia, R., Marillonnet, S. 2009. Golden Gate Shuffling: A One-Pot DNA Shuffling Method Based on Type IIs Restriction Enzymes. Plos One, 4 (5).
[0348] 10. Engler, C., Kandzia, R., Marillonnet, S. 2008. A One Pot, One Step, Precision Cloning Method with High Throughput Capability. Plos One, 3 (11).
[0349] 11. Gerstmans, H., Criel, B., Briers, Y. 2018. Synthetic biology of modular endolysins. Biotechnology Advances, 36 (3), 624-640.
[0350] 12. Grimon, D., Gerstmans, H., Briers, Y., Lavigne, R. 2019. Polynucleotide shuffling method, US 2019/0323017 A1.
[0351] 13. Harayama, S. 1998. Artificial evolution by DNA shuffling. Trends in Biotechnology, 16 (2), 76-82.
[0352] 14. Hoffmann, C., Leis, A., Niederweis, M., Plitzko, J. M., Engelhardt, H. 2008. Disclosure of the mycobacterial outer membrane: Cryo-electron tomography and vitreous sections reveal the lipid bilayer structure. Proceedings of the National Academy of Sciences of the United States of America, 105 (10), 3963-3967.
[0353] 15. Jarlier, V., Nikaido, H. 1990. Permeability barrier to hydrophilic solutes in Mycobacterium chelonei. J Bacteriol, 172 (3), 1418-23.
[0354] 16. Lane, M. D., Seelig, B. 2014. Advances in the directed evolution of proteins. Current Opinion in Chemical Biology, 22, 129-136.
[0355] 17. Marrakchi, H., Laneelle, M. A., Daffe, M. 2014. Mycolic acids: structures, biosynthesis, and beyond. Chem Biol, 21 (1), 67-85.
[0356] 18. Mcneil, M., Daffe, M., Brennan, P. J. 1990. Evidence for the Nature of the Link between the Arabinogalactan and Peptidoglycan of Mycobacterial Cell-Walls. Journal of Biological Chemistry, 265 (30), 18200-18206.
[0357] 19. Miller, S. 2015. Composition for use in mycobacteria therapy, Google Patents.
[0358] 20. Mitnick, C. D., McGee, B., Peloquin, C. A. 2009. Tuberculosis pharmacotherapy: strategies to optimize patient care. Expert Opin Pharmacother, 10 (3), 381-401.
[0359] 21. Muller, B., Durr, S., Alonso, S., Hattendorf, J., Laisse, C. J. M., Parsons, S. D. C., van Helden, P. D., Zinsstag, J. 2013. Zoonotic Mycobacterium bovis-induced Tuberculosis in Humans. Emerging Infectious Diseases, 19 (6), 899-908.
[0360] 22. Nelson, D. C., Schmelcher, M., Rodriguez-Rubio, L., Klumpp, J., Pritchard, D. G., Dong, S. L., Donovan, D. M. 2012. Endolysins as Antimicrobials. Advances in Virus Research, Vol 83: Bacteriophages, Pt B, 83, 299-365.
[0361] 23. Neyrolles, O., Guilhot, C. 2011. Recent advances in deciphering the contribution of Mycobacterium tuberculosis lipids to pathogenesis. Tuberculosis (Edinb), 91 (3), 187-95.
[0362] 24. Niederweis, M. 2008. Nutrient acquisition by mycobacteria. Microbiology-Sgm, 154, 679-692.
[0363] 25. Nordwald, E. M., Garst, A., Gill, R. T., Kaar, J. L. 2013. Accelerated protein engineering for chemical biotechnology via homologous recombination. Current Opinion in Biotechnology, 24 (6), 1017-1022.
[0364] 26. Pritchard, L., Corne, D., Kell, D., Rowland, J., Winson, M. 2005. A general model of error-prone PCR. Journal of Theoretical Biology, 234 (4), 497-509.
[0365] 27. Sani, M., Houben, E. N. G., Geurtsen, J., Pierson, J., de Punder, K., van Zon, M., Wever, B., Piersma, S. R., Jimenez, C. R., Daffe, M., Appelmelk, B. J., Bitter, W., van der Wel, N., Peters, P. J. 2010. Direct Visualization by Cryo-EM of the Mycobacterial Capsular Layer: A Labile Structure Containing ESX-1-Secreted Proteins. Plos Pathogens, 6 (3).
[0366] 28. Schmelcher, M., Donovan, D. M., Loessner, M. J. 2012. Bacteriophage endolysins as novel antimicrobials. Future Microbiology, 7 (10), 1147-1171.
[0367] 29. Sharma, U. K. 2017. Phage-derived compositions for improved mycobacterial therapy, Google Patents.
[0368] 30. Tee, K. L., Wong, T. S. 2013. Polishing the craft of genetic diversity creation in directed evolution. Biotechnology Advances, 31 (8), 1707-1721.
[0369] 31. Tenland, E., Krishnan, N., Ronnholin, A., Kalsum, S., Puthia, M., Morgelin, M., Davoudi, M., Otrocka, M., Alaridah, N., Glegola-Madejska, I., Sturegard, E., Schmidtchen, A., Lerm, M., Robertson, B. D., Godaly, G. 2018. A novel derivative of the fungal antimicrobial peptide plectasin is active against Mycobacterium tuberculosis. Tuberculosis, 113, 231-238.
[0370] 32. Vilcheze, C., Jacobs, W. R. 2007. The mechanism of isoniazid killing: Clarity through the scope of genetics. Annual Review of Microbiology, 61, 35-50.
[0371] 33. Vincent, A. T., Nyongesa, S., Morneau, I., Reed, M. B., Tocheva, E. I., Veyrier, F. J. 2018. The Mycobacterial Cell Envelope: A Relict From the Past or the Result o Recent Evolution? Frontiers in Microbiology, 9.
[0372] 34. Watanabe, M., Aoyagi, Y., Ridell, M., Minnikin, D. E. 2001. Separation and characterization of individual mycolic acids in representative mycobacteria. Microbiology-Sgm, 147, 1825-1837.
[0373] 35. Zuber, B., Chami, M., Houssin, C., Dubochet, J., Griffiths, G., Daffe, M. 2008. Direct visualization of the outer membrane of mycobacteria and corynebacteria in their native state. Journal of Bacteriology, 190 (16), 5672-5680.
[0374] 36. Abouhmad, A., Korany, A. H., Grey, C., Dishisha, T., Hatti-Kaul, R. 2020. Exploring the Enzymatic and Antibacterial Activities of Novel Mycobacteriophage Lysin B Enzymes. International Journal of Molecular Sciences, 21 (3176).
[0375] 37. Velayati A. A, Farnia P, Ibrahim T. A, Haroun R. Z, Kuan H. O, Ghanavi J, Farnia P, Kabarei A. N, Tabarsi P, Omar A. R, Varahram M, Masjedi M. R. 2009. Differences in Cell Wall Thickness between Resistant and Nonresistant Strains of Mycobacterium tuberculosis: Using Transmission Electron Microscopy. Chemotherapy, 55:303-307
[0376] 38. Kongari, R., Rajaure, M., Cahill, J., Rasche, E., Mijalis, E., Berry, J., Young, R. 2018. Phage spanins: diversity, topological dynamics and gene convergence. BMC Bioinformatics, 19 (326).
[0377] 39. Gutiérrez Fernández, D., Briers, Y. 2020. Developments and opportunities of bacteriophage lytic proteins for therapeutics against gram-negative pathogens. Semantic Scholar, DOI: 10.21775/9781913652517.15, Corpus ID: 219418090.
[0378] 40. Gerstmans, H, Grimon, D., Gutiérrez, D., Lood, C., Rodríguez, A., vanNoort, V., Lammertyn, J., Lavigne, R., Briers, Y. 2020. A VersaTile-driven platform for rapid hit-to-lead development of engineered lysins. Science Advances, 6 (23).
[0379] 41. van Schie L, Borgers K, Michielsen G, Plets E, Vuylsteke M, Tiels P, Festjens N, Callewaert N. Exploration of Synergistic Action of Cell Wall-Degrading Enzymes against Mycobacterium tuberculosis. Antimicrob Agents Chemother. 2021 Sep. 17; 65 (10): e0065921. doi: 10.1128/AAC.00659-21. Epub 2021 Jul. 19. PMID: 34280017; PMCID: PMC8448103.

### EXAMPLES

### Example 1

### Materials and Methods

[0380] Different LysB and LysA genes were codon optimized and synthesized as gene fragments (gBlock) (FIG. 2) from Integrated DNA Technologies (IDT, Leuven, Belgium). The gene fragments were amplified with PCR using Phusion® High fidelity DNA polymerase (Thermo Scientific®, Pittsburgh, PA, USA) to include the restriction site of the BsaI restriction enzyme using the following PCR primers (SEQ ID NOs: 115-146, see Table 1) and cloned into pVTSEIII cloning vector with the aid of BsaI restriction enzyme and transformed into E. coli TOP 10 cloning host (Grimon et al., 2019).

TABLE 1
PCR primers.

| Target | Forward Primer (5′-3′) | Reverse Primer (5′-3′) |
|---|---|---|
| LysB_D29 | GCAGCTCTTC AAGAGGTCTC AGTGCAAGCA | CTTGCTCTTCGCTTGGTCTC GCCTGCGATC |
| | AGCCCTGGCT G | TGTCGTAGGA ACTCGACCGC |
| | (SEQ ID NO: 115) | (SEQ ID NO: 116) |
| LysB_Omega | GTAGCTCTTC CAGAGGTCTC GGTGCTTTGA | GCAGCTCTTCGCTTGGTCTCGCCTGCATTT |
| | ACGGTGAATT TTACGTTCCG G | TTACGAAGTT CATTGCCCGT GC |
| | (SEQ ID NO: 117) | (SEQ ID NO: 118) |
| LysB_Saal | TCAGCTCTTC CAGAGGTCTC GGTGCTCGCA | CGAGCTCTTC CCTTGGTCTC |
| | TCGACGGTCA ATATGTG | GCCTGCTGTG CGCAGGTAAT CGATCG |
| | (SEQ ID NO: 119) | (SEQ ID NO: 120) |
| LysB_DS6A | GTCGCTCTTC CAGAGGTCTC GGTGCTACCT | ATTGCTCTTC GCTTGGTCTC |
| | GGATTGGCTG GC | GCCTGCCGCG GCTAAAGCCA AGC |
| | (SEQ ID NO: 121) | (SEQ ID NO: 122) |
| LysB_ | ATGGCTCTTC TAGAGGTCTC GGTGCTCTGA | TGTGCTCTTC ACTTGGTCTC |
| Obama12 | AGTTAGGATC AAACGGGC | GCCTGCTGTT ACAGACGCGA CAATGCG |
| | (SEQ ID NO: 123) | (SEQ ID NO: 124) |
| LysB_Enkosi | GCTGCTCTTC TAGAGGTCTC GGTGCTTCTA | GTTGCTCTTC GCTTGGTCTC |
| | AGCCTGTGCT GTTGACTGC | ACCTGCGGCG GCCATAGCGC G |
| | (SEQ ID NO: 125) | (SEQ ID NO: 126) |
| LysB_Bxz2 | TCGGCTCTTC TAGAGGTCTC GGTGCTCCGT | AGTGCTCTTCACTTGGTCTCGCCTGCTGAG |
| | TACGCGTGGG C | CGAAGAAAAT CAATCGCCG |
| | (SEQ ID NO: 127) | (SEQ ID NO: 128) |
| LysB_L5 | CGTGCTCTTCTAGAGGTCTC TGTGCTAGTA | GCCGCTCTTC GCTTGGTCTC |
| | AACCGTGGTT ATTTACTGTG C | GCCTGCAATG CGACGCAGAA ATTCTACG |
| | (SEQ ID NO: 129) | (SEQ ID NO: 130) |
| LysB_Ms6 | CTCGCTCTTCTAGAGGTCTC GGTGCTCGTA | ATCGCTCTTC GCTTGGTCTC |
| | TCGACGGCCA ATATGTTGG | GCCTGCCGTG CGGAGATAGT CG |
| | (SEQ ID NO: 131) | (SEQ ID NO: 132) |
| LysA_DS6A | TATGCTCTTCTAGAGGTCTC | CTAGCTCTTC GCTTGGTCTC |
| | GGAAGCATGTTAACTGTAGAGAGCTTCGCTGC | TGAGCCACGA CCAGCTTCGC GATCTGC |
| | (SEQ ID NO: 133) | (SEQ ID NO: 134) |
| LysA_BTCU | GTAGCTCTTC TAGAGGTCTC AGAAGCACAG | GTTGCTCTTCGCTTGGTCTC TGAGCCTTGT |
| | AGCGTGTCCT GC | TCAATAATGC GATTATGTGT AAC |
| | (SEQ ID NO: 135) | (SEQ ID NO: 136) |
| LysA_Bxb1 | TCAGCTCTTC TAGAGGTCTC GGAAGCCCTC | CGAGCTCTTC GCTTGGTCTC |
| | GCGTGGTCTA TGGTC | TGAGCCCGCC GCGTGAAATT TCTG |
| | (SEQ ID NO: 137) | (SEQ ID NO: 138) |
| LysA_D29 | GTCGCTCTTC TAGAGGTCTC GGAAGCACCT | TGTGCTCTTC GCTTGGTCTC |
| | TGATTGTAAC GCGCG | TGAGCCTAAC GCGCCGTTGC G |
| | (SEQ ID NO: 139) | (SEQ ID NO: 140) |
| LysA_Giles | ATCGCTCTTC TAGAGGTCTC GGAAGCCCTG | TGTGCTCTTC GCTTGGTCTC |
| | TCTATGCGAT TCAGTCTG | TGAGCCCAAA ACCAGGCCGA TTTTGG |
| | (SEQ ID NO: 141) | (SEQ ID NO: 142) |
| LysA_Ms6 | ACTGCTCTTC TAGAGGTCTC GGAAGCACTA | TGCGCTCTTC GCTTGGTCTC |
| | CAAAGGACCA GGTAGCG | TGAGCCATGT CCCAGCAACT CCG |
| | (SEQ ID NO: 143) | (SEQ ID NO: 144) |
| LysA_TM4 | GCTGCTCTTC TAGAGGTCTC GGAAGCTCAT | GTAGCTCTTC GCTTGGTCTC |
| | TTACGCGCTT TCTCCAAG | TGAGCCTGCC GCGCCACCAT C |
| | (SEQ ID NO: 145) | (SEQ ID NO: 146) |

[0381] The transformation mixtures were plated on LB agar plates supplemented with ampicillin (100 μg/ml) and 5% sucrose as selection markers. Plasmids were extracted from colonies 5 and were verified by sequencing (LGC genomics GmbH, Berlin, Germany). The clones with the right sequences were used as tiles for library construction and further in DNA shuffling reactions. Glycerol stocks of the tiles with the correct sequences cloned in pVTSEIII and transformed into E. coli Top 10 were prepared and stored at −80° C.

### Construction of Libraries

[0382] To construct a library for DNA shuffling, different tiles comprising different sets of enzymes were assembled together according to their required positions into pVTSDI, II and III expression vectors with the aid of SapI restriction enzyme (Grimon et al., 2019).

[0383] The positions in the final assembly of the DNA shuffling reactions were as follows:
[0384] For library 1: N-terminal 6×Histag from pVTSDI expression vector followed by different variants of antimicrobial peptides (AMPs) with different properties (cationic, polycationic, hydrophobic or amphipathic) are in position 1, LysB enzyme variants in position 2, linkers with different properties (flexible or rigid, helix or coil, short or long) are in position 3 and finally LysA enzyme variants with different mechanisms of actions are in position 4.
[0385] For library 2: antimicrobial peptides (AMPs) variants with different properties (cationic, polycationic, hydrophobic or amphipathic) are in position 1, LysB enzyme variants in position 2, linkers with different properties (flexible or rigid) are in position 3 and finally different variants of enzyme active domains (EADs) with different mechanisms of actions are in position 4 followed by 6×Histag from the pVTSDIII expression vector.
[0386] For library 3: variants of antimicrobial peptides (AMPs) with different properties (cationic, polycationic, hydrophobic or amphipathic) are in position 1, LysB enzymes in position 2, linkers with different properties (flexible or rigid) are in position 3 and finally LysA enzymes with different mechanisms of actions are in position 4 and finally protein transduction domains (PTDs) in position 5 followed by 6×Histag from the pVTSDIII expression vector. Moreover, different libraries were constructed for exclusion criteria, through removing one of the modules, the libraries are summarized in Table 2. The libraries were constructed with the aid of SapI restriction enzyme and T4 DNA ligase enzyme with the following cycling parameters (Table 3) in a thermal cycler.

TABLE 2
Organization and positions of the modules in the designed libraries.

| Library | Pos1 | Pos2 | Pos3 | Pos4 | Pos5 |
|---|---|---|---|---|---|
| 1 | AMPs | LysB | Linker | LysA | — |
| 2 | AMPs | LysB | Linker | EADs | |
| 3 | AMPs | LysB | Linker | LysA | PTDs |
| 4 | AMPs | LysB | — | — | — |
| 5 | AMPs | Linker | LysB | — | — |
| 6 | AMPs | LysA | — | — | |
| 7 | AMPs | Linker | LysA | — | — |
| 8 | AMPs | EADs | — | — | — |
| 9 | AMPs | Linker | EADs | — | — |
| 10 | LysB | Linker | LysA | — | — |
| 11 | LysB | Linker | EADs | — | — |

[0387] Swapping the positions of any of the components in Table 2 would not be expected to impact the functionality of the peptides derived from said libraries. For example, swapping LysA and LysB in libraries 1-3 would be expected to yield peptides with similar activities as those derived from libraries 1-3. Likewise, the AMP may be N-terminal, C-terminal or between other domains, without negatively impacting the overall activity of peptides derived from such libraries. Further, increasing the number of modules (e.g. having AMP at both termini) may be expected to enhance activity further.

TABLE 3
Thermal cycler parameters used for the shuffling reactions
(Grimon et al., 2019, US 2019/0323017 A1).

| | Temperature | | Number |
|---|---|---|---|
| Step | (° C.) | Time | of cycles |
| Restriction | 37° C. | 2 min | 30 |
| Ligation | 16° C. | 3 min | |
| Ligase inactivation | 50° C. | 5 min | 1 |
| Type IIs inactivation | 65° C. | 20 min | 1 |

### Expression of Libraries

[0388] The ligation mixture comprising different libraries was transformed into chemically competent E. coli codon plus expression host according to the manufacturer's instructions and plated on LB agar plates supplemented with kanamycin (50 μg/ml) and 5% sucrose as selection markers and incubated at 37° C. for overnight.

[0389] For preculture preparation, colonies were picked up with sterile toothpicks and used to inoculate 200 μl of LB medium in 96 well sterile plates supplemented with kanamycin (50 μg/ml) and 5% sucrose as selection markers and incubated at 37° C. for overnight, 100 μl of the 96 well preculture plates were used to prepare glycerol stocks and stored at −20° C.

[0390] Each well contains a different clone, i.e. the 96 well plate is representing 96 different clones. For expression of libraries, 20 μl of the precultures were added to 500 μl of autoinduction medium (containing per liter: 10 g α-lactose, 2.5 g glucose, 5 g glycerol, 2 mM KH₂PO₄, 2 mM MgSO₄, 50 mM Na₂HPO₄, 25 mM (NH₄)₂SO₄, 5 g yeast extract and 10 g of tryptone) in 96 deep well plates. The deep well plates were incubated at 37° C., 1000 rpm (IKA-Vibramax-VXR; IKA-Labortechnik, Staufen, Germany) for the first 4 hours and then continued for 48 hours at 30° C. The cells were harvested by centrifugation (4500 rpm, 4° C., 20 min, Sigma 3-16PK), the supernatant was discarded, and the cell pellet was used for cell lysate preparation. E. coli codon plus expression strain transformed with blank plasmids (plasmids without any inserts) were subjected to the same cultivation and expression conditions and used as controls.

[0391] The clarified cell lysate was loaded on SDS-PAGE to check the expression levels of the induced clones. For expression, LB medium was applied. The inocula was prepared by inoculating 10 ml LB medium supplied with kanamycin (50 μg/ml) with 50 μl glycerol stock of the corresponding clones, incubated overnight at 37° C., 200 rpm. The inocula were used to inoculate 100 ml of LB medium supplemented with kanamycin (50 μg/ml) and incubated at 37° C., 200 rpm till the OD600ₙₘ of ≈0.5-0.6. For induction, IPTG was added to a final concentration of 1 mM and the cultivation was continued at 30° C. for extra 4 hours.

[0392] To test the effect of temperature on the expression levels and the solubility of the induced proteins, induction with IPTG (1 mM) was performed at 16° C., 180 rpm for 72 hours. To check the expression levels and solubility of the expressed proteins, samples were taken ate the end of the induction period and checked by SDS-PAGE.

### Preparation of Cell Lysate

[0393] The cells were lysed by exposure to chloroform vapours, the deep-well plates were put upside-down in a glass chamber containing filter papers on its bottom. Twenty milliliters of chloroform were added, then immediately the glass chamber was sealed, and the deep well plates were incubated above a chloroform-saturated filter papers for 2 hours in the fume hood.

[0394] Later on, the plates were inverted and set to stand for another 15 minutes in the fume hood, the cell pellet was resuspended in 500 μl of resuspension buffer (50 mM Tris-HCL, 50 mM NaCl, pH 8) supplemented with 1 U of DNase I enzyme and incubated at 30° C., 100 rpm for 1 hour. The cell debris was removed by centrifugation (4500 rpm, 4° C., 60 min, Sigma 3-16PK) and the clarified cell lysate was stored at 4° C. for further screening. LB cultures were lysed using BugBuster® (Novagen, Madison, WI, USA) cell lysis solution according to the manufacturer's instructions. The lysed cell suspension was centrifuged at 14000 rpm, 30 min at 20° C. The crude extract as well as the cell debris (after resuspension in the same starting volume in 50 mM Tris, 50 mM NaCl, pH 8) were loaded to SDS-PAGE.

### Screening of the Antibacterial Activity of the Expressed Libraries

[0395] Screening of the antibacterial activity was done through antibacterial (growth) assay method. Any suitable screening method can be used to determine activity of the library, and screening methods are known to the skilled person, such as the screening method used in Gerstmans et al., 2020 and Tenland et al., 2018 and Van Schie et al. 2021.

[0396] Briefly, the inocula of the test strains (Mycobacterium smegmatis mc² 155; ATCC 700084, Mycobacterium abscessus, Nocardia iowensis, Rhodococcus erythropolis and Staphylococcus aureus) were grown overnight in Mueller-Hinton broth (MH) broth at 37° C., 200 rpm. For initial screening of the antibacterial activity, the final inoculum size (bacterial load) of the M. smegmatis in the assay was adjusted to (≈4×10⁵ CFU/ml) through dilution in 2×MHB. To increase the stringency of the assay conditions the final inoculum size of M. smegmatis in the assay was adjusted (≈4×10⁷ CFU/ml) and (≈4×10⁸ CFU/ml). For the assay, 50 μl of different inoculum size was mixed with 50 μl of the clarified cell lysate in a microtiter plate and incubated at 37° C. for 24 h.

[0397] Endpoint measurement at OD625 nm was performed in a microplate reader (Multiskan™ GO Microplate Spectrophotometer, Thermo Scientific) after 24 h and the MIC can be determined by eye as well. For determination of the bactericidal effect, 50 μl of the clear wells (wells with no growth) was spotted in LB agar and incubated for 24 h at 37° C. and examined for growth. A well with 100 μl 2×MH broth served as negative control, another well with the test strain only was considered as positive control. For screening against Mycobacterium bovis bacillus Calmette-Guerin (BCG), BCG expressing luxAB was diluted in Middlebrook 7H9 medium (106 CFU; 50 μl/well) in 96-well opaque white plates (Corning).

[0398] Fifty microliters of the clarified cell lysate were added to the wells, the plates were incubated at 37° C. for 24 h before adding 0.1% n-decyl aldehyde (Decanal, Sigma), a substrate for bacterial luciferase. Bioluminescence was measured as relative luminescence unit (RLU) for 1 s using a TriStar2 microplate reader (Berthold Technologies) (Tenland et al., 2018).

### Results

### Library Construction

[0399] The correct assembly of the libraries was checked through sequencing (GATC Biotech AB, Solna, Sweden) of the shuffled enzymes and peptides each on its correct position. Sequencing analysis of the sequenced clones was done using Geneious prime software, (Geneious version 2020.1.2; Biomatters Ltd., Auckland, New Zealand).

### Expression of the Constructed Libraries

[0400] The expression levels of the expressed libraries were checked on SDS-PAGE. The expression levels of the initial expression screening of the constructed libraries were quite low, no protein bands corresponding to the estimated molecular mass of the expressed clones were detected on SDS-PAGE (FIG. 2). On the other hand, expression in LB medium resulted in decent expression levels corresponding to the calculated molecular mass both at 30° C. and 16° C., however the majority of the expressed proteins are in the insoluble fraction (FIG. 2).

### Screening of the Expressed Libraries

[0401] The initial screening of most the constructed libraries was done against Mycobacterium smegmatis mc² 155 strain with a bacterial load of (≈4×10⁵ CFU/ml) and resulted in many active hits (Data not shown). The test stringency was increased to make a filtration/selection criterion through gradual increase of the bacterial load from (≈4×10⁵ up to 4×10⁸ CFU/ml). The data was normalized by subtraction from the negative control well.

[0402] Wells with no visible bacterial growth both at the end of the incubation period and after subculture on LB agar plates were considered as positive antibacterial activity hits. Wells with bacterial growth were compared with the positive control well for identification of any inhibitory effect of the expressed clones in the corresponding wells.

[0403] Library 1 with the organization (AMPs-LysB-Linker-LysA) exhibited the highest numbers of positive active hits against Mycobacterium smegmatis mc² 155 strain with a bacterial load of (≈4×10⁸ CFU/ml) (FIG. 3).

[0404] Screening of the second library against Mycobacterium smegmatis mc² 155 strain with a bacterial load of (≈4×10⁸ CFU/ml) resulted in much lower number of active variants (FIG. 4), potentially due to a lack of the cell wall binding domains (CBD) that are present in LysA enzymes shuffled in the first library. The proposed function of the cell wall binding domain is to bring the catalytic domain to a proximity of the peptidoglycan thus facilitating its interaction with the peptidoglycan layer of the mycobacterial cell wall. Moreover, LysA enzymes are modular enzymes comprising more than one catalytic domain with different mechanisms of action targeting different bonds in the peptidoglycan structure and a cell wall binding domain.

[0405] Due to the limited transformation efficiency of the third library, only few clones were transformed and screened against Mycobacterium smegmatis mc² 155 strain (≈4×10⁸ CFU/ml) with some active hits were obtained (FIG. 5).

[0406] The expressed libraries (1, 2 and 3) were also tested for their antibacterial activities against different species from the order Actinomycetales including Nocardia iowensis (FIGS. 6-8) and Rhodococcus erythropolis (FIGS. 9-11) and resulted in some clones with antibacterial activity. The expressed libraries were also tested for their antibacterial activity against some pathogenic strains including Mycobacterium bovis bacillus Calmette-Guerin (BCG) and Mycobacterium abscessus strains. The antibacterial activity against Mycobacterium bovis bacillus Calmette-Guerin (BCG) was expressed as percentage of growth inhibition of the bacterial cells compared to positive control (FIGS. 12-14). The majority of the expressed clones from libraries 1, 2 and 3 showed a potential antibacterial activity against BCG strain with % antibacterial efficiency up to 98% (FIGS. 12-14).

[0407] On the other hand, the antibacterial activity against the pathogenic Mycobacterium abscessus was expressed as 99, 90 and 0% inhibition in comparison with positive control (FIGS. 15-17). Almost half of the expressed clones from the library 1 showed antibacterial inhibition against Mycobacterium abscessus with 6 clones demonstrated 99% inhibition (FIG. 15). Moreover, only 14 clones expressed from library 2 were positive against Mycobacterium abscessus with 3 variants showed 99% inhibition (FIG. 16). On the contrary, only 2 variants expressed from library 3 inhibited the growth of Mycobacterium abscessus by 95% (FIG. 17).

[0408] For exclusion criteria, different libraries with domain organizations were constructed and screened. Expressed clones from library 4 (AMPs-LysB) did not exhibit antimycobacterial activity against Mycobacterium smegmatis (FIG. 18).

[0409] Addition of linkers between AMPs and LysB enzymes was used to construct library 5 (AMPs-Linkers-LysB), which did not exhibit antimycobacterial activity after expression against Mycobacterium smegmatis (FIG. 19).

[0410] Library 6 was constructed by direct fusion of AMPs with LysA enzymes and failed to express antimycobacterial activity against Mycobacterium smegmatis as well (FIG. 20).

[0411] Separating the AMPs from LysA enzymes by linkers was the basis to design library 7 which upon screening against Mycobacterium smegmatis did not show antimycobacterial activity (FIG. 21). The enzyme active domains (EADs) were either fused directly to AMPS (library 8) or via linkers (library 9) which did not result in antimycobacterial activity upon testing against Mycobacterium smegmatis (FIGS. 22 and 23).

[0412] Furthermore, different libraries had been constructed through excluding the AMPs, LysB enzymes were shuffled with either LysA enzymes (library 10) or EADs (library 11). It seems that the AMPs are crucial for exerting the antibacterial activity, since there was no antibacterial activity was detected for libraries 10 and 11 against Mycobacterium smegmatis with a bacterial load of 10⁵ CFU/ml (FIGS. 24 and 25).

[0413] In addition, LysB, LysA enzymes as well as EADs were cloned individually and expressed in E. coli codon plus expression host and their antibacterial activity was also tested. None of the respective enzymes exhibited antibacterial activity against Mycobacterium smegmatis with a bacterial load of 10⁵ CFU/ml (FIGS. 26-28) suggesting that the antibacterial activity is a result of synergistic effect of LysB, LysA/EADs and AMPS.

[0414] AMPs that are active against gram negative or Gram-positive bacteria (which may have no activity when tested against mycobacteria) can be combined with LysB and LysA/EAD to result in peptides capable of activity against Mycobacterium. Alternatively, AMPs with activity specific to mycobacteria may be used.

[0415] Peptides resembling those of US 2017/0136102 A1 (Sharma) failed to demonstrate activity against Mycobacterium, even in the presence of anti-TB drugs. The Sharma peptides are comprised of an AMP with LysB but lack any LysA (or LysA-like domain/EAD), and so it is not unexpected that such peptides actually fail to produce antimycobacterial activity.

[0416] The expressed libraries (1, 2 and 3) were tested for their antibacterial selectivity/specificity through testing against Gram-positive and negative strains. A representative of the pathogenic Gram-positive tested bacterial strain is Staphylococcus aureus, against which none of the expressed clones from the corresponding libraries (1, 2 and 3) showed bacterial growth inhibition (Data not shown). In the same context, the expressed libraries (1, 2 and 3) did not exhibit bactericidal activity against the Gram-negative tested E. coli strain (FIGS. 29-31). Altogether, these data indicate that the specificity/selectivity of the expressed libraries (1, 2 and 3) is against mycobacterial strains only.

TABLE 4
Constructs showing antimycobacterial activity

| | | | | | | Anti- |
|---|---|---|---|---|---|---|
| | | | | | | mycobacterial |
| Library | Pos1 | Pos2 | Pos3 | Pos4 | Pos5 | activity |
| 1 | AMPs | LysB | Linker | LysA | — | YES |
| 2 | AMPs | LysB | Linker | EADs | | YES |
| 3 | AMPs | LysB | Linker | LysA | PTDs | YES |
| 4 | AMPs | LysB | — | — | — | NO |
| 5 | AMPs | Linker | LysB | — | — | NO |
| 6 | AMPs | LysA | — | — | — | NO |
| 7 | AMPs | Linker | LysA | — | — | NO |
| 8 | AMPs | EADs | — | — | — | NO |
| 9 | AMPs | Linker | EADs | — | — | NO |
| 10 | LysB | Linker | LysA | — | — | NO |
| 11 | LysB | Linker | EADs | — | — | NO |

### CONCLUSION

[0417] For all libraries prepared, only a small fraction of the possible combinations has been tested as a proof in principle for workable fusions of particular configurations. Therefore, the exemplified hits in libraries should not be construed as being the only hits that work for a particular library. The key point is that the proof in principle data shows that workable constructs can be developed of certain configurations (i.e. those that contain (i) a first domain with activity specific to a peptidoglycan or component thereof, (ii) a second domain with activity specific to an ester linkage; and (iii) a third domain with membrane permeabilising activity), while configurations lacking these essential components always fail to demonstrate antimycobacterial activity unless they are used in particular mixtures.

### Example 2

[0418] After observing the positive findings for Libraries 1-3, additional libraries were constructed in which the domains present, and their positioning within the fusion protein, were altered (see Table 5). The same screening approach was performed as with Example 1.

TABLE 5
Additional constructs showing antimycobacterial activity

| | | | | | | Anti- |
|---|---|---|---|---|---|---|
| | | | | | | mycobacterial |
| Library | Pos1 | Pos2 | Pos3 | Pos4 | Pos5 | activity |
| 12 | AMPs | LysA | Linker | LysB | — | YES |
| 13 | AMPs | EAD | Linker | LysB | — | YES |
| 14 | LysB | Linker | LysA | AMP | — | YES |
| 15 | LysA | Linker | LysB | AMP | — | YES |
| 16 | LysB | AMP | LysA | — | — | YES |

[0419] Library 12 with the organization (AMPs-LysA-Linker-LysB) exhibited the highest numbers of positive active hits against Mycobacterium smegmatis mc² 155 strain with a bacterial load of (≈4×10⁸ CFU/ml) (FIG. 32), at a slightly higher rate than was seen for Library 1.

[0420] Library 13 resulted in a much lower number of active variants (FIG. 34), potentially due to a lack of the cell wall binding domains (CBD) that are present in LysA enzymes shuffled in the first library, as hypothesised previously with respect to Libraries 1 and 2.

[0421] The domains of Library 12 were reversed to form Library 14. This means that the orientation of each domain is flipped, such that the previous N- to C-terminal fusions of Library 12 are instead in a C- to N-configuration for Library 14. For example, an exemplary peptide of Library 12 may be comprised of SEQ ID NOs: 58+12+108+16, from N-terminus to C-terminus, meaning that the C-terminus of SEQ ID NO: 58 is fused to the N-terminus of SEQ ID NO: 12, and so on. The reversed peptide of Library 14 would therefore be SEQ ID NOs: 16+108+12+58, from N-terminus to C-terminus, meaning that the N-terminus of SEQ ID NO: 58 is fused to the C-terminus of SEQ ID NO: 12, and so on.

[0422] Library 12 exhibited a hit rate of 46.9%, and reversing the orientation of the domains maintained a hit rate of 36.5%.

[0423] The domains of Library 1 were also reversed to form Library 15 (in the same way as Libraries 12 and 14 with respect to each other). However, despite reorientation of the domains in the fusion protein, a number of successful hits for antimycobacterial fusion peptides were identified.

[0424] These reorientation data demonstrate that the domains of the fusion peptide can be in either orientation with respect to each other, while maintaining the beneficial properties of the fusion peptides.

[0425] A further library (library 16) was developed that used AMP domains in place of a linker between LysB and LysA (i.e. LysB-AMP-LysA fusion peptides), to form 3-domain fusion peptides that exclude the linkers described herein. A number of successful hits for antimycobacterial fusion peptides were identified, thereby demonstrating that a linker is not essential for retaining the beneficial properties of the fusion peptides. An alternative way to consider library 16 is that the AMP acts as a linker between LysA and LysB.

[0426] As previously shown for libraries 1-3, in the same context, the expressed libraries (12-16) did not exhibit bactericidal activity against the Gram-negative tested E. coli strain (FIGS. 33, 35, 37, 39 and 41). Altogether, these data indicate that the specificity/selectivity of the expressed libraries (12-16) is against mycobacterial strains only.

### CONCLUSION

[0427] As with Example 1, for all libraries prepared, only a small fraction of the possible combinations and/or reorientations of domains have been tested as a proof in principle for workable fusions of particular configurations. Therefore, the exemplified hits in libraries should not be construed as being the only hits that work for a particular library. The key point is that the proof in principle data shows that workable constructs can be developed of certain configurations (i.e. those that contain (i) a first domain with activity specific to a peptidoglycan or component thereof, (ii) a second domain with activity specific to an ester linkage; and (iii) a third domain with membrane permeabilising activity), while configurations lacking these essential components always fail to demonstrate antimycobacterial activity unless they are used in particular mixtures, and that the domains used can be oriented in either direction within the fusion peptide.

### Example 3

[0428] Growth curves were prepared when constructing the various libraries to assess whether there were any differences in expressing the proteins based on their configuration. The comparison was made based on optical density (OD_{625 nm}), which positively correlates with expression levels (i.e. a higher mass of bacterial growth results in a larger expression level of the fusion protein).

[0429] The components used for all conditions were as follows:
[0430] AMP=Ci-MAM-A24;
[0431] Linker=Linker 1;
[0432] LysA=TM4; and
[0433] LysB=D29.

[0434] Fusions of AMP-LysA, AMP-LysB and AMP-LysB-Linker-LysA (referred to as 4D10) were created using these domains, and expressed in bacteria as previously described. The bacteria were grown in LB medium for up to 8 hours, with optical density being assessed at 2, 3, 4, 6 and 8 hours. For 4D10, a considerably faster expression level was achieved, as shown by the vastly increased optical density at 2 and 3 hours in FIG. 42. Surprisingly, even 8 hours later the AMP-LysA and AMP-LysB conditions did not achieve equivalent expression levels as 4D10 at 3 hours.

[0435] These data support an advantage of the fusion peptides comprised of all three domains (compared with the prior art 2-domain peptides), which are able to be expressed faster. It is also important to note the advantage of expressing the required proteins for antimycobacterial activity in a single bacterial colony. On the other hand, if mixtures of AMP-LysA and AMP-LysB are required to achieve antimycobacterial activity, then two separate bacterial colonies must be created, each protein purified, and the mixture then formed. The present invention therefore streamlines the process while obtaining the surprising technical effect of faster expression. Furthermore, AMP-LysA and AMP-LysB constructs were observed to be toxic to E. coli, used as the host for peptide expression, thereby resulting in a lower rate of expression. Surprisingly, fusion peptides comprising AMP, LysA and LysB removed this host toxicity, resulting in the faster rate of expression. Accordingly, by creating fusions of AMP-LysA-LysB, such as 4D10, it is possible to express anti-mycobacterial peptides in host E. coli that would otherwise (i.e. in an AMP-LysA or AMP-LysB format) result in E. coli cytotoxicity.

[0436] A summary of the growth inhibition and mycobacterial specificity for clone 4D10 can be seen in the Table 6.

TABLE 6
Growth inhibition of various mycobacteria
and bacterial controls for 4D10.

| Test strain | Growth inhibition |
|---|---|
| Mycobacterium smegmatis 10⁸ CFU/ml | >70% |
| Mycobacterium bovis 10⁶ CFU/ml | >99% |
| Mycobacterium abscessus 10⁷ CFU/ml | >99% |
| E. coli 10⁸ CFU/ml | 0% |
| Staphylococcus aureus 10⁸ CFU/ml | 0% |
| Micrococcus lysodeikticus 10⁶ CFU/ml | 0% |

### Example 4

### Methods

### Expression and Purification

[0437] Different combinations and mixtures of AMP (Ci-MAM-20, SEQ ID NO: 37), LysA (TM4, SEQ ID NO: 13) and LysB (D29, SEQ ID NO: 15) were constructed according to Table 7. Each construct was expressed in E. coli CodonPlus (DE3)-RIL, preculture of 10 mL of LB medium supplemented with kanamycin and grown overnight. 150 ml of Terrific Broth (TB) medium supplemented with Kanamycin were inoculated with 3 ml of the preculture, and incubated at 37° C. When the optical density (OD600ₙₘ) reached 0.5-0.6, the cells were induced for protein expression using IPTG at a final concentration of 0.5 mM at 16° C. for 18 hours. The cells were harvested by centrifugation and the cell pellet was resuspended in 20 ml of binding buffer (50 mM Tris-HCl, 0.5 M NaCl, 20 mM imidazole, pH 8) and sonicated on ice. Lysates were cleared by centrifugation (18,500×g, 30 min) and filtered (0.22-μm). The clarified lysate was purified using HisTrap FF™ nickel column (GE Healthcare Bio-Sciences AB, Uppsala, Sweden). The eluted fractions were pooled together and dialyzed against dialysis buffer (50 mM Tris-HCl, 0.5 M NaCl, pH 8) overnight at 4° C. Protein concentration was measured by nanodrop, and samples were kept at 4° C.

### Testing the Antibacterial Activity of the Purified Samples

[0438] Mycobacterium smegmatis mc² (155; ATCC 700084) was grown overnight in Mueller-Hinton broth (MHB) at 37° C. For the assay, 50 μl of 4×10⁵ CFU/ml M. smegmatis cells were mixed with 50 μl of the purified proteins (35-50 μg) in a microtiter plate in duplicates and incubated at 37° C. for 24 hours. The endpoint measurement at OD625ₙₘ was performed in a microplate reader (Multiskan™ GO Microplate Spectrophotometer, Thermo Scientific) after 24 hours. A well with 100 μl MHB served as 100% inhibitory activity positive control, and another well with M. smegmatis cells was considered as 0% inhibitory activity negative control.

### Results

[0439] Neither LysA (50 μg) nor LysB (50 μg) alone or in a mixture showed any antimycobacterial activity against M. smegmatis. Neither AMP-LysA (50 μg) nor AMP-LysB (50 μg) alone showed any antibacterial activity, but when both were present in a mixture (AMP-LysA (50 μg) and AMP-LysB (50 μg)), 50% inhibitory activity was observed (FIG. 43). Surprisingly, however, the fusion protein AMP-LysB-Linker-LysA (Seq ID: 38+16+104+14) 35 μg showed 100% inhibitory activity (FIG. 43).

TABLE 7
The antibacterial activity of the purified proteins

| | SEQ | Total amount | Concentration | Inhibitory |
|---|---|---|---|---|
| Construct/Mixture | ID NOS | (μg) | (μM) | activity (%) |
| LysA | 14 | 50 | 8.4 | 0 |
| LysB | 16 | 50 | 17 | 0 |
| LysA and | 14 and 16 | 50 + | 25.4 | 0 |
| LysB | | 50 = 100 | | |
| AMP-LysA | 38 + 14 | 50 | 7.8 | 0 |
| AMP-LysB | 38 + 16 | 50 | 14.6 | 0 |
| AMP-LysA and | (38 + 14) and | 50 + | 22.2 | 50 |
| AMP-LysB | (38 + 16) | 50 = 100 | | |
| AMP-LysB- | 38 + 16 + | 35 | 3.75 | 100 |
| Linker-LysA | 104 + 14 | | | |

[0440] There are potential safety issues for using certain AMPs at high doses, and so it is advantageous to be able to use AMPs at lower doses while maintaining AMP activity. Therefore, the amount of each component was estimated using a percentage fraction based on kDa of the fusion peptide (see Table 8). These data demonstrate that the fusion peptide is more effective despite being at a lower over amount (in μg), which allows the creation of more effective fusion peptides with increased function at lower concentrations. Such improved peptides are particularly advantageous from a safety point of view for dosing recipients of the fusion peptides.

TABLE 8
Amount and concentration of each component used based on kDa.

| | Mixture | | Fusion peptide | |
|---|---|---|---|---|
| | AMP-LysA and AMP-LysB | | AMP-LysB-Linker-LysA | |
| Element | μg | μM | μg | μM |
| LysA | 47.7 | 7.8 | 22.0 | 3.8 |
| LysB | 45.5 | 14.6 | 10.7 | 3.8 |
| AMP | 6.8 | 22.3 | 1.1 | 3.9 |
| Fusion/ | 100 | NA | 35 | 3.8 |
| Mixture | | | | |

[0441] The concentration of AMP, LysA and LysB is substantially lower in the fusion peptide AMP-LysB-Linker-LysA, and AMP in particular with almost 6 times lower concentration than used in the mixture (AMP-LysA and AMP-LysB), which only obtained half the inhibitory activity of the fusion peptide.

1. A peptide comprising:
(i) a first domain with activity specific to a peptidoglycan or component thereof, and
(ii) a second domain with activity specific to an ester linkage; and
(iii) a third domain with membrane permeabilising activity.

2. The peptide according to claim 1, further comprising a fourth domain that is at least one protein transduction domain (PTD).

3. The peptide according to claim 1, wherein the first domain is an enzyme domain.

4. The peptide according to claim 1, wherein the second domain:
(iv) is an enzyme domain;
(v) is specific to the ester linkage between mycolic acid and arabinogalactan; or between mycolic acid and trehalose or between arabinogalactan and peptidoglycan, and/or any member of the alpha/beta hydrolase family;
(vi) is specific to alpha and/or beta hydrolases;
(vii) is a mycolyl arabinogalactan esterase and/or a mycolyl-arabinogalactan-(vii) peptidoglycan (mAGP) hydrolase; and/or
(viii) have mechanisms of action corresponding to alpha/beta hydrolase activity, esterase activity, lipase activity, protease activity, TDMH, cutinase activity, trehalose dimycolate hydrolase (TDMH), Pectinesterase, CheB methylesterase, Glycerophosphoryl diester phosphodiesterase, Plant invertase/pectin methylesterase inhibitor, Carboxylesterase family, Calcineurin-like phosphoesterase, Putative esterase, Thioesterase domain, Hemagglutinin esterase, Calcineurin-like phosphoesterase superfamily domain, Pectinacetylesterase, Putative serine esterase, Esterase PHB depolymerase, Esterase-like activity of phytase, Chitin recognition protein, Glycosyl hydrolase all families, Amidase, Lipase all families, GDSL-like Lipase/Acylhydrolase, Partial alpha/beta-hydrolase lipase region, GDSL-like Lipase/Acylhydrolase family, Secretory lipase, Patatin-like phospholipase, Carboxylesterase, Variant-surface-glycoprotein phospholipases all families, Putative lysophospholipase, Alpha/beta-hydrolase superfamily, Hydrolase, haloacid dehalogenase-like hydrolase, epoxide hydrolase and dehalogenases, peroxidase, or any combinations thereof.

5. (canceled)

6. The peptide according to claim 1, wherein the peptide comprises multiple domains corresponding to a first domain, second domain, third domain, and/or fourth domain, wherein the multiple domains are:
(i) repeats of the same domain;
(ii) different domains but with the same type of activity;
(iii) derived from the same source; or
(iv) derived from different sources.

7. The peptide according to claim 1, wherein the third domain with membrane permeabilising activity is an antimicrobial peptide (AMP) or portion thereof, a holin or portion thereof, and/or a spanin or portion thereof,
optionally wherein the AMP or a portion thereof is cationic, polycationic, hydrophobic, amphipathic, synthetic or natural or any combination thereof (or comprises portions that are cationic, polycationic, hydrophobic, amphipathic, synthetic or natural, or any combination thereof).

8. The peptide according to claim 1, wherein the peptide further comprises at least one linker peptide, wherein the linker peptide connects:
(i) the first domain to the second domain;
(ii) the second domain to the third domain;
(iii) the first domain to the third domain; and/or
(iv) a domain to a further linker.

9. The peptide according to claim 1, wherein:
(i) the first domain and/or second domain comprises a domain with a mechanism of action selected from the group consisting of amidase, transglycosylase, chitinase, muramidase and/or peptidase, N-acetylmuramoyl-L-alanine amidase, Amidases in general including all families, D-Alanine-meso-Diaminopimelic (DD) endopeptidase, c-D-glutamyl-meso-diaminopimelic acid (DL) peptidase, Endopeptidases in general including all families, lytic trans glycosylases, N-acetylmuramidase, lysozyme, L-alanoyl-D-glutamate (LD), m-DAP-m-DAP (LD) endopeptidase in general, D-alanyl-D-alanine carboxypeptidase, Glycoside hydrolases in general including all families, L-Alanine-D-Glutamate peptidase, cysteine protease, N-acetyl-β-D-glucosaminidase carboxypeptidase, glycosidase (glucosaminidases), transpeptidases, epimerase, γ-D-glutamyl-meso-diaminopimelic acid (DL) peptidases, and/or combinations thereof;
(ii) any one or more of the domains are effective against the phylum Actinobacteria; derived from the class Actinobacteridae; derived from the order Actinomycetales, and/or Bifidobacteriales;
(iii) any one or more of the domains are effective against Mycobacterium selected from the group consisting of: Mycobacterium tuberculosis, Mycobacterium microti, Mycobacterium africanum, Mycobacterium bovis, Mycobacterium canettii, Mycobacterium pinnipedii, Mycobacterium caprae, Mycobacterium mungi, Mycobacterium leprae, Mycobacterium ulcerans, Mycobacterium xenopi, Mycobacterium shottsii, Mycobacterium avium, Mycobacterium avium subsp. paratuberculosis, Mycobacterium paratuberculosis, Mycobacterium intracellulare, Mycobacterium smegmatis, Mycobacterium abscessus, Mycobacterium kansasii, Mycobacterium terrae, Mycobacterium nonchromogenicum, Mycobacterium gordonae, and Mycobacterium triviale, and non-tuberculosis mycobacteria (NTM); and/or
(iv) any one or more of the domains are derived from at least one mycobacteriophage and/or at least one Mycobacterium prophage.

10. The peptide according to claim 1, wherein any one or more of the domains are a mutant, variant or wildtype domain;
wherein the mutant or variant retains substantially the same level of activity of the wildtype domain.

11-13. (canceled)

14. A polynucleotide, vector, and/or cell comprising a nucleic acid encoding a peptide comprising
(i) a first domain with activity specific to a peptidoglycan or component thereof, and
(ii) a second domain with activity specific to an ester linkage; and
(iii) a third domain with membrane permeabilising activity.

15. (canceled)

16. An in vitro method of lysing, killing, reducing growth of, or reducing viability of mycobacteria, wherein the method comprises administering a peptide according to claim 1.

17. A device comprising a peptide according to claim 1.

18.-19. (canceled)

20. The peptide according to claim 3, wherein the enzyme domain is a lysin.

21. The peptide according to claim 1, wherein the first domain is a LysA or at least a portion thereof, or the second domain is a LysB or at least a portion thereof.

22. The peptide according to claim 21, wherein:
(i) the portion of LysA or the portion of LysB is an enzyme active domain (EAD); or
(ii) the LysA or LysB comprises a cell wall binding domain (CBD).

23. The peptide according to claim 22, wherein the cell wall binding domain (CBD) is:
(i) specific to a bacterial target of interest;
(ii) is not specific to the cell walls of Gram positive or Gram negative bacteria; or
(iii) is specific to mycobacterial cell walls.

24. A method for treating infection, granulomas or biofilms, or promoting wound healing, the method comprising administering to an individual in need thereof a therapeutically effective amount of a peptide comprising:
(i) a first domain with activity specific to a peptidoglycan or component thereof, and
(ii) a second domain with activity specific to an ester linkage; and
(iii) a third domain with membrane permeabilising activity.

25. The method according to claim 24, wherein the infection is:
(i) a mycobacterial infection; or
(ii) tuberculosis; or
(iii) an infection caused by a bacteria selected from Mycobacterium tuberculosis, Mycobacterium microti, Mycobacterium africanum, Mycobacterium bovis, Mycobacterium canettii, Mycobacterium pinnipedii, Mycobacterium caprae, Mycobacterium mungi, Mycobacterium leprae, Mycobacterium ulcerans, Mycobacterium xenopi, Mycobacterium shottsii, Mycobacterium avium, Mycobacterium avium subsp. paratuberculosis, Mycobacterium paratuberculosis, Mycobacterium intracellulare, Mycobacterium smegmatis, Mycobacterium abscessus, Mycobacterium kansasii, Mycobacterium terrae, Mycobacterium nonchromogenicum, Mycobacterium gordonae, and Mycobacterium triviale, and non-tuberculosis mycobacteria.
(iv) a respiratory, ocular, skin, oral or dental infection; or
(v) a bacterial infection caused by a bacterium that is resistant to at least one drug or is classified as multidrug-resistant (MDR), extremely drug-resistant (XDR), or totally drug-resistant (TDR).

26. The method according to claim 24, further comprising administration of at least one additional therapeutic agent.

27. The method according to claim 26, wherein the additional therapeutic agent is an anti-mycobacterial agent.

The application's sequence listing, which the Patent Office published only in electronic form, follows.

SEQUENCE LISTING (339 sequences)

SEQ ID NO: 1 - DNA, 1566 bp, Artificial Sequence
  LysA-BTCU-1
atgacagagcgtgtcctgccgtatgatcgtaatattgtaccacaagaaacgggttggtggtgcggtccggcagcgacgcaagttgttctgaatagtcgtggaattattgtaccggaagcgaccctggcaaatgaaattgaacaaattgaaaatccaggtcgcggtgacgatcgtgatggaacggattatgtggggcttattgaacaagtgcttgatcgccgtgtgcccgaagcgaaatatacgagcgtgtatatgcctaatgatccgcccaccgcagcccaacgcgaagctttatggcaaaatattgtgcgctccattaatgcgggctggggtgtcattatgaattgggtggcgccgccatccaataaaccacgcggagtcaaaggtagccccaatcctaaatattcaggtggtacaacttatcattatgtggcctgtatgggttatgatgatactccgggcgcccgcgccttgtggattgcggattctgggtttcaaccctttaattattggatttcgtttgatcaagcagcaacgctcattccacctaaagggtatgcgtatgccgcgacgacggctacagctcctgcgccggctccagcccctgttgatgcggcacccattttagcacgcgcagctgggattagcgaagctaaagcacgtgaaatcttacccacctttcgtgatggtttgcgcttagctgaatgtaataatgttccgcgcattgcaatgtttattgcacaaacaggccacgaaagcgataattttaatgccactcaagaatatgatcatggccgtaattatggcgatccaaatgaagcaaccgatcgttggaaatataaagggcgtacgtggatccaaattacatggcgtggtaattatgagcgtttctcacgttggtgttttgatcgtaaattggtgcctaccccaacatattttgtagataatccacgcgcactcgcggatgttcgttgggcaggaattggcgcggcgtggtattggacggtagaacgtccttccattaatcgcctgtgtgatgagcgtaatttaacggaagttactcgtctgattaatggtggcacatcgtgggaagccccaacctggatgaaacatcgtaaagaacgttatgatcgtgcgttagctgtgggtaatgatcttttaaagctgttagatggcgaagaagaagggtttctgtcggcgcttacgccgaaagagcaacgtgaactttatgatgaaattatgaaacgtgggcctagccgtagctttcttgcggatgatggtcgtcaaatcgaaacgctgctcggttttatttataatattgatggaaatgcgtggaatattgtgaatattcttggttgtttgattggtgtaccagagtgtgtcgatgatattcgtgacgttgccgaaaatggagtacgtaaaggttcatatgcagaaagtaatccctggctcgcgcaatttggtcaagaattttgtaaacgtttgcttccccttgctggtaaactgtctgaactcttgaatgcacaagaatttaaggttacacataatcgcattattgaacaatga

SEQ ID NO: 2 - protein, 521 aa, Artificial Sequence
  LysA-BTCU-1
MTERVLPYDRNIVPQETGWWCGPAATQVVLNSRGIIVPEATLANEIEQIENPGRGDDRDGTDYVGLIEQVLDRRVPEAKYTSVYMPNDPPTAAQREALWQNIVRSINAGWGVIMNWVAPPSNKPRGVKGSPNPKYSGGTTYHYVACMGYDDTPGARALWIADSGFQPFNYWISFDQAATLIPPKGYAYAATTATAPAPAPAPVDAAPILARAAGISEAKAREILPTFRDGLRLAECNNVPRIAMFIAQTGHESDNFNATQEYDHGRNYGDPNEATDRWKYKGRTWIQITWRGNYERFSRWCFDRKLVPTPTYFVDNPRALADVRWAGIGAAWYWTVERPSINRLCDERNLTEVTRLINGGTSWEAPTWMKHRKERYDRALAVGNDLLKLLDGEEEGFLSALTPKEQRELYDEIMKRGPSRSFLADDGRQIETLLGFIYNIDGNAWNIVNILGCLIGVPECVDDIRDVAENGVRKGSYAESNPWLAQFGQEFCKRLLPLAGKLSELLNAQEFKVTHNRIIEQ

SEQ ID NO: 3 - DNA, 1434 bp, Artificial Sequence
  LysA-Bxb1
atgcctcgcgtggtctatggtcttacacattctagcaatggctggcctatgctgaactcggacgaatgtgaatggaccaaaattccggggacgtcagtaaccttacaaattgcgaaaggacaaccgctggcaattttgcgtgcttttgcggcagattttcatgcttatgttgaacctctccgtgatgctgatagtgcctgttggacaccaacaaatagtgttcccagctcgaatcatttgtctggaactgcaatggatcttaattggaatacacatccttttcaagttcccgatgcgggttttgatgctgccaagaaggctcgtgtaaaggaactgttggatttctatgaaggaatggtcttttggggtaatgattggagctcaccgaaagacgcaatgcattttcaactggcttccttacgtaatggtggcacgtttgacacgtatggtaatcccaaaacggctgattttattgcccgtaaaattcgtgccgatggatattctacgtttcgtcgtggatcagcgcctgcctcagccgcgccaattttggcagcagcgacgggtctttcggaagcgcgtgccgcagaaattttaccagcagtgcgtagcggtctgcgtgagagtgaatgtactaatgtgaatcgtattgccatgtggttggcgcaaattggccacgagagcggaagttttcaatatacagaagaaattgcgaagaatggtcgctatgcaccatatattggtcgcacctggatccaaattacttgggattataattatcgttcttttagccaatgggcctatgcctttggtatggtccctacaccagattattttgttgtaaattatcgtgaactggcggacttaaaatgggccggaattggtccggcgtggtattggactgttgcgcgtcccgatattaatgaattaagtgatcgtcgtgatttgaataccgtaactcgtcgcattaatggtggtacgaatggtctggctgaccgccaggcgcgttataatcgtgcattggctcaaggtgacgccctcttgcagctgttgcatgaggaagatgattttctgtcagcgttaacggatgccgagcaacgcgaactgctcgatttagcccgtcaacaagcgaaatataaacgtaaaagccgtagccccttacattggcctcatgaaggtgaagttgatacaattgcgggattgagctggtctaccgatgcaaatgttcacattcaattagttgaaaagctggcagttatttatggggatcccgttagcattgcacttttatatgccgtttccaattcggatgaccctaccaataatccggaattagccaaacgtattttaaaacgtgtgaaaccggaagatattacggcagcccaagtgcaaattcaaaagtggctcgcggcggaacagaaatttcacgcggcgtga

SEQ ID NO: 4 - protein, 477 aa, Artificial Sequence
  LysA-Bxb1
MPRVVYGLTHSSNGWPMLNSDECEWTKIPGTSVTLQIAKGQPLAILRAFAADFHAYVEPLRDADSACWTPTNSVPSSNHLSGTAMDLNWNTHPFQVPDAGFDAAKKARVKELLDFYEGMVFWGNDWSSPKDAMHFQLASLRNGGTFDTYGNPKTADFIARKIRADGYSTFRRGSAPASAAPILAAATGLSEARAAEILPAVRSGLRESECTNVNRIAMWLAQIGHESGSFQYTEEIAKNGRYAPYIGRTWIQITWDYNYRSFSQWAYAFGMVPTPDYFVVNYRELADLKWAGIGPAWYWTVARPDINELSDRRDLNTVTRRINGGTNGLADRQARYNRALAQGDALLQLLHEEDDFLSALTDAEQRELLDLARQQAKYKRKSRSPLHWPHEGEVDTIAGLSWSTDANVHIQLVEKLAVIYGDPVSIALLYAVSNSDDPTNNPELAKRILKRVKPEDITAAQVQIQKWLAAEQKFHAA

SEQ ID NO: 5 - DNA, 1482 bp, Artificial Sequence
  LysA-D29
atgaccttgattgtaacgcgcgaccatgcgcaatgggtacacgacatgtgtcgtgcccgtgcgggtaatcgttatgggtatggtggtgcctttaccctgaatccgcgtgatacgacggattgttcaggattagtgttacaaaccgccgcgtggtatggtggccgtaaagattggattggcaatcgctatggatcaaccgaatcctttcgcttagatcataaaattgtttatgatttaggatttcgccgtctgccacccggcggtgtcgcagcgctcggctttacgcctgtgatgctggtgggattacaacatggtggtggtggtcgctatagccatactgcgtgtaccctcatgaccatggatattccgggcggtccagtaaaagtatcacagcgtggtgttgattgggaaagccgtggtgaggtgaatggggttggcgtattcttatatgatggtgcccgtgcgtggaatgatcctctgtttcatgatttctggtatttggatgccaaattggaagatggtcctacccaatccgtggatgcagcagagattctggcgcgtgccaccggactggcatataatcgcgctgtcgccttacttcctgcggtccgcgacgggttaattcaagcagattgtacgaatcctaaccgtattgccatgtggctggctcaaattggacacgaatctgatgactttaaagcaacagcagaatatgcgagtggcgacgcatatgatactcgtacagatttggggaatactcccgaagttgatggtgatggacgcctgtataaaggacgcagttggattatgattactgggaaagataattatcgcgattttagtcgctgggcgcatgggcgcgggcttgtaccgacacctgattattttgtcgtgcatcctttggaacttagcgaattacgttgggccggaattggcgcagcttggtattggactgtggaacgtccggatattaatgcgttatcggatcgtcgtgatctggagactgtgactcgtcgtattaatggcggtctgacgaatctggacgatcgtcgccgtcgctataatttagcgctggcagttggggatcagctgttaaccctcattggtgacgatgatgagctggcggacccgaccatccaacgttttattcgtgaaattcatggtgccctctttaatacagtggttacacaaagcccttatggtgatccccaaaatcccgatggttcagaaccgcgctccaatctttggcaactgcacgaattgattaagaatggtgatggaatgggccatgcgcgttatgtggaagagagtgcacgcgctggcgatctgcgtgaattagaacgtgtggtgcgtgcggcgaaaggtttaggccgcgaccgttcgccggaatttattgcccgtgcgcgtaatgtacttgcacaaattgaagccgcgaatccggaatatctgcaagcctatattgcgcgcaacggcgcgttatga

SEQ ID NO: 6 - protein, 493 aa, Artificial Sequence
  LysA-D29
MTLIVTRDHAQWVHDMCRARAGNRYGYGGAFTLNPRDTTDCSGLVLQTAAWYGGRKDWIGNRYGSTESFRLDHKIVYDLGFRRLPPGGVAALGFTPVMLVGLQHGGGGRYSHTACTLMTMDIPGGPVKVSQRGVDWESRGEVNGVGVFLYDGARAWNDPLFHDFWYLDAKLEDGPTQSVDAAEILARATGLAYNRAVALLPAVRDGLIQADCTNPNRIAMWLAQIGHESDDFKATAEYASGDAYDTRTDLGNTPEVDGDGRLYKGRSWIMITGKDNYRDFSRWAHGRGLVPTPDYFVVHPLELSELRWAGIGAAWYWTVERPDINALSDRRDLETVTRRINGGLTNLDDRRRRYNLALAVGDQLLTLIGDDDELADPTIQRFIREIHGALFNTVVTQSPYGDPQNPDGSEPRSNLWQLHELIKNGDGMGHARYVEESARAGDLRELERVVRAAKGLGRDRSPEFIARARNVLAQIEAANPEYLQAYIARNGAL

SEQ ID NO: 7 - DNA, 1461 bp, Artificial Sequence
  LysA-DS6A
atgatgttgacggtcgagtctttcgccgctgctatgggtaattcactgtctgtagaccgttatcgccagcttttcccagcagctgttgagtctatggttgcctgcggttgtactaccgttaatcgcgcggcaatgtggcttgcacaggtagggcacgagtccgggggtctgcgttggatggaggagctggccagcggagccgcttacgagtggcgctctgatttaggcaacactcaggcaggagatggggtccgctttaaaggtcgtgggcctattcaaattacgggacgttacaactaccgtaaggtgagcgaatgggcgcatgcacaaggcatcgtccctacgccaacctactttgtggataatcctactcaactggcaagtgatcaatatggttttatcggggtctcgtggtattggcaacatggggggccacgtccaggccaaatcaatggcttcgccgacgcaggagatattttatccggttcgcgctgtgtaaatgggtgggtaacgaccccaaatggcatgccggaccgcaccgagcgttggaaccgttgtcgtgcaatgggcgaccaaatccttccagcaggcgcaggtactgataatggaggggatggtatggcttggactggagatccggtgtggttagaagacgtgttgcgccccgtattaggggaccgtcttcgcgtccttccttcgtggcaaatgtacggtcacggtgatttcaaagatatccgtggagttatggtgcatcatactgggaacgcgcgtgaaacagcagagtccattcgtaagggccgtccagatttgcgtggcccgttgtcgaacatccacatcgcgcccgatggaaccgttacacttgttgccgcaggtgtttgctggcacgccggtgccgggtcatacccgtggttacctaccaataatgccaattggcatatgatcggaattgaatgcgcatggcctactattcgtccgaacgggacatacgacgagcgcgagccttggcccgatgcgcaaattatcgctatgcgcgatacgtgtgccgccttaaccaaacgtctgggctgggacgcctcgcgcgttattggccacaaggaatatgccggggcttctcagggaaaatgggatccagggaatttggatatgggttggttccgtggtgaggttgctaaagcgatgcgcggcgagttcgatccaaaggcgccagcaccagcacccaacccaccggcagacaatgacaatgggggcttccttatggcgcttaacgataagcaacaacatgatttatacaatgcggttatgactatcgcagcagtcgctgccgacatccaaacacaattacgcggtcccggccttcgtggttggccccaattgggccgcaatgcgaacggtgaggcattaaccctggtggatgctgtgggagtcatcaaggccattgcggatcgcgaggccgggcgttga

SEQ ID NO: 8 - protein, 485 aa, Artificial Sequence
  LysA-DS6A
MLTVESFAAAMGNSLSVDRYRQLFPAAVESMVACGCTTVNRAAMWLAQVGHESGGLRWMEELASGAAYEWRSDLGNTQAGDGVRFKGRGPIQITGRYNYRKVSEWAHAQGIVPTPTYFVDNPTQLASDQYGFIGVSWYWQHGGPRPGQINGFADAGDILSGSRCVNGWVTTPNGMPDRTERWNRCRAMGDQILPAGAGTDNGGDGMAWTGDPVWLEDVLRPVLGDRLRVLPSWQMYGHGDFKDIRGVMVHHTGNARETAESIRKGRPDLRGPLSNIHIAPDGTVTLVAAGVCWHAGAGSYPWLPTNNANWHMIGIECAWPTIRPNGTYDEREPWPDAQIIAMRDTCAALTKRLGWDASRVIGHKEYAGASQGKWDPGNLDMGWFRGEVAKAMRGEFDPKAPAPAPNPPADNDNGGFLMALNDKQQHDLYNAVMTIAAVAADIQTQLRGPGLRGWPQLGRNANGEALTLVDAVGVIKAIADREAGR

SEQ ID NO: 9 - DNA, 1209 bp, Artificial Sequence
  LysA-Giles
atgcctgtctatgcgattcagtctggaactgttatttacgccggtgccgcatcgggatatggtggtcctgaccctgcaggctggcttgttattgattctgatgatgccgagggtggcggctgtttagagtatggtcatattgtccgtgaggtaaatcgtggtgatcatgtgacggcgggtcaacgtattggacatattaatccaaataatcgtacgaatggtggagtggccccgcatcttcatgtaactgactggccacatgcgtatgggcaaggcagccgtcaaaatgtgatggcacgcttgagtggagcccgcgagccagaagcccaagcggccccaacccccacagagcaaggcactgttgttggtgacccggtttggttggcggatgtagtgcgcccaactgtagctaaatttgcggagtatcctggctggcgtaatcgtggtcacggtgattttaaggatatccgtggagttatggttcatcatacaggtgggcccgcctctgcagcctcaattgcgaatggccgcccagaccttgccggccctcttgcacagctgcatatttcgcgtgatgggacagttactgtcgtagctgtaggagtggcttggcatgcgggtgcaggcagctatccatggttaccgaccaacatgggtaattggcacttgattggtattgaatgtgagtggccatatggtgagccgggaattaatgagcgtaatgcctatacagtacgctggcgtgatccagagattattgcgctgcgtaatacatgtgcggcaattttactgcgccttggcctcggggtagatcgcctgattggccataaggattatgccggccgtgctcaaggcaagtgggacccgggaaatatgagcatggactggctgcgtggcgaggtgcgtaaagatatggatggctttgtatttcccggtgaggatattgtaaatgtgaccccgccaccagtcccggcccctgtccctgccccgccagcgactgcgaatgttcttctccatcgtggtatgagtggacctaatgttgtcaaattacagacaactctccgtcgttggtattcaaaactggcggtagacggtgattttggcccccatacagaggcatgtgtacgcgatcgccaacgcatttatgggttggacgtggatggtattgtcggaccattaactgcggccaaaatcggcctggttttgtga

SEQ ID NO: 10 - protein, 402 aa, Artificial Sequence
  LysA-Giles
MPVYAIQSGTVIYAGAASGYGGPDPAGWLVIDSDDAEGGGCLEYGHIVREVNRGDHVTAGQRIGHINPNNRTNGGVAPHLHVTDWPHAYGQGSRQNVMARLSGAREPEAQAAPTPTEQGTVVGDPVWLADVVRPTVAKFAEYPGWRNRGHGDFKDIRGVMVHHTGGPASAASIANGRPDLAGPLAQLHISRDGTVTVVAVGVAWHAGAGSYPWLPTNMGNWHLIGIECEWPYGEPGINERNAYTVRWRDPEIIALRNTCAAILLRLGLGVDRLIGHKDYAGRAQGKWDPGNMSMDWLRGEVRKDMDGFVFPGEDIVNVTPPPVPAPVPAPPATANVLLHRGMSGPNVVKLQTTLRRWYSKLAVDGDFGPHTEACVRDRQRIYGLDVDGIVGPLTAAKIGLVL

SEQ ID NO: 11 - DNA, 1155 bp, Artificial Sequence
  LysA-Ms6
atgactacaaaggaccaggtagcgcagattacaattgcagaggcaaaagcccgtgggtatactcgttcagagtgtttagccattatgtctacgttttatcaggaaagcggttggaatgatactatttgggatcctacgcatacaacgtatggaatcgcgcaacaagatggtagttatccccatcgttttgatggcgcggccgcgcagattaagggtttctttgataaactggatgtttggcgtgcaaagccgggcgcatcgacagacatttggcttaatatttgttggatgcaacaagcgccgaattggccgtcggccgattattggtatgcgaatggtcgtcgtgcttatctgacagagattaaaagtcgtattgcgacggttacgccgtatctggataaatattggcctgctgacggcggcacggcggttccagatgagcctcgtccggactttaatgagttcccaatttggtcaaataataattcggcgcgttcaggtaaaccgactatgtttctgattcatacgcaggaaggcggtggtggtgatgccgcagctgaaaatttggccaaatggtttcaaaatggtaatggagtgtcctatcattataccattagccaggcaagcgacggcggcgtaaccgtagtggactgtgtagatacggatcgtgcggcgtggagcgtcggaaatgctaatagtattagtattaatttgtgttttgctggatcacgcgcgagctggatgcgcgaccaatggatgaaacaatcgaatgctattgatgttgccgcgtatctggctgttcaagatgccaagaaatatggttttacgcccttggtcgtaccgccgccgtacaccaacggccgtccggggattagcgatcatcgctgggttactgatgtatttaaatggggtacccatacggatgttggtgattggtttccttgggattattttgcggagcgcgttaatcattgggcaaatggcggtaaaacggaaccggagccacctaaagttaagcgttttcctgatgattggagcgatcgtgagattctggttgaaattcttcgccagttacgtgggtataatttgaccgggtggccacaattgggtggcaagacactggtagatgctgtggcggagttgctgggacattga

SEQ ID NO: 12 - protein, 384 aa, Artificial Sequence
  LysA-Ms6
MTTKDQVAQITIAEAKARGYTRSECLAIMSTFYQESGWNDTIWDPTHTTYGIAQQDGSYPHRFDGAAAQIKGFFDKLDVWRAKPGASTDIWLNICWMQQAPNWPSADYWYANGRRAYLTEIKSRIATVTPYLDKYWPADGGTAVPDEPRPDFNEFPIWSNNNSARSGKPTMFLIHTQEGGGGDAAAENLAKWFQNGNGVSYHYTISQASDGGVTVVDCVDTDRAAWSVGNANSISINLCFAGSRASWMRDQWMKQSNAIDVAAYLAVQDAKKYGFTPLVVPPPYTNGRPGISDHRWVTDVFKWGTHTDVGDWFPWDYFAERVNHWANGGKTEPEPPKVKRFPDDWSDREILVEILRQLRGYNLTGWPQLGGKTLVDAVAELLGH

SEQ ID NO: 13 - DNA, 1644 bp, Artificial Sequence
  LysA-TM4
atgtcatttacgcgctttctccaagacgatcccttgctgactcgtgaacaggtaatggcagaactcatccgcgttgctgatgaattgaatatgcctgataaacgtggagcatgtgtgatcgcaggaatgactatctcacaggaagttggtgtgaaagataatgatcccccatttgaacgccgtttctggtgtccagcaaatcgtgcggatccagagtcttttaattatccacatgatagtgagtccaatgatggacgttcagtggggtattttcaacaacaaaagggcccaaatggtgaactttggtggggcactaccgcgagtgaaatgaatttacatagtgcagccacccaattcatgactcgtttaaaagccgcgggttataatgcctctaatgcgcaagccgcaaatgattctgctcaagctattcaacgttcaggtgttccacaagcctataaacagtggtgggatgatatcaatcgtttatatgataaagtaaaaggtagcggcggcggacccgcaccggctcccaaaccacctcaaagcggtccttggactggtgatcctgtttggttagcagatgtattacgtgcagaaggcttgaatgttgttgaactccctggttggttagatcgtggtcatggagatatgggtcgtctgtggggcgtcgtatgtcaccatactggtagtgacaatactccaagctctgaaatcgcattccatcccagcctgggtctttgttcccaaatccatcttgcccgtaatggtacggttacactttgtggcgttggtattgcgtggcacgcaggagtgggatcgtacccggggttgccggaagataatgcaaatgccgtgacaattggtattgaagcacaaaattcgggtacatacgatggtgctcctcatcgcaccaactggccggatgcacagtatgatgcgtacgtcaaatgttgtgcggctatttgtcgtcgtctgggagtccgtgcagaccatgtaatttcgcataaagagtgggcgggccgtaaacagggtaagtgggacccgggagcgattgatatgaatattttccgtgcggatgttcaacgtcgtattgatgcgcaccagccgaatggtgaagatgactttatggcggctctgagcgcggatgaacaacgtgaagttttgaatcttttgcgtgttttagcggatcgccgctttgtgagtcgttcaccttttcgtcatctcggtgaaggtccatccgagacggtagcgggctttggtttaaatacggatggactgaaccatgctcaatataccatcgaactcgcacgtctcggggatcctacccatttagcgttactccgtgaagtagctagtgcggaaggggattctcgttacccggatcgccaatatgatgcgaaattggcgaaacgtgtcttggctgagattgaaggtgcggcgaccgcgcctgcgaaaccttctactccttcagcgccaacggaaccagcaccggaagcacctactccaccggtgaaagcggcttgtgcactcagcgccgcgggctgtgtagtagcggggagcacttcaggtggtggttgtgcgttatcgacagatggtacggggaaatgtgtggtcactgcggccactgatggtggcgcggcatga

SEQ ID NO: 14 - protein, 547 aa, Artificial Sequence
  LysA-TM4
MSFTRFLQDDPLLTREQVMAELIRVADELNMPDKRGACVIAGMTISQEVGVKDNDPPFERRFWCPANRADPESFNYPHDSESNDGRSVGYFQQQKGPNGELWWGTTASEMNLHSAATQFMTRLKAAGYNASNAQAANDSAQAIQRSGVPQAYKQWWDDINRLYDKVKGSGGGPAPAPKPPQSGPWTGDPVWLADVLRAEGLNVVELPGWLDRGHGDMGRLWGVVCHHTGSDNTPSSEIAFHPSLGLCSQIHLARNGTVTLCGVGIAWHAGVGSYPGLPEDNANAVTIGIEAQNSGTYDGAPHRTNWPDAQYDAYVKCCAAICRRLGVRADHVISHKEWAGRKQGKWDPGAIDMNIFRADVQRRIDAHQPNGEDDFMAALSADEQREVLNLLRVLADRRFVSRSPFRHLGEGPSETVAGFGLNTDGLNHAQYTIELARLGDPTHLALLREVASAEGDSRYPDRQYDAKLAKRVLAEIEGAATAPAKPSTPSAPTEPAPEAPTPPVKAACALSAAGCVVAGSTSGGGCALSTDGTGKCVVTAATDGGAA

SEQ ID NO: 15 - DNA, 765 bp, Artificial Sequence
  LysB-D29
atgagcaagccctggctgttcaccgttcacggcacgggccagcccgatcccctcgggcctggcctgcctgccgatacggcacgcgacgtacttgacatctaccggtggcagcccatcggcaactaccccgctgcggccttcccgatgtggccgtcggtcgagaagggtgtcgccgagctgatcctgcagatcgagctgaagctggacgcggacccctacgcggacttcgcgatggcgggttactcgcagggagccatcgtggttggccaggtgctcaagcaccacatcctgcctccgacgggcaggctccacaggttcctgcaccggctcaagaaggtcatcttctggggtaatcccatgcggcagaagggctttgcccactctgacgagtggatccacccggtcgctgcccctgacaccctcggaatcctcgaggaccggctcgaaaacctggagcagtacggcttcgaggtccgcgactacgcccacgacggtgacatgtacgcctccatcaaagaggacgacctgcacgaatacgaggtcgccatcggccggatcgtgatgaaggccagcggcttcatcggtggccgggactccgtggtagcccagctcatcgagcttggccagcgtccgatcaccgagggaattgcgttggcgggagccatcatcgacgccctcacgttcttcgcccgctctcgtatgggcgacaagtggccgcacctctacaaccgctacccggcggtcgagttcctacgacagatctga

SEQ ID NO: 16 - protein, 254 aa, Artificial Sequence
  LysB-D29
MSKPWLFTVHGTGQPDPLGPGLPADTARDVLDIYRWQPIGNYPAAAFPMWPSVEKGVAELILQIELKLDADPYADFAMAGYSQGAIVVGQVLKHHILPPTGRLHRFLHRLKKVIFWGNPMRQKGFAHSDEWIHPVAAPDTLGILEDRLENLEQYGFEVRDYAHDGDMYASIKEDDLHEYEVAIGRIVMKASGFIGGRDSVVAQLIELGQRPITEGIALAGAIIDALTFFARSRMGDKWPHLYNRYPAVEFLRQI

SEQ ID NO: 17 - DNA, 846 bp, Artificial Sequence
  LysB-Omega
atgttgaacggtgaattttacgttccggcagggacaatcattactgccaacgggacaggggttccagatggtgcggggcccggatttggtgccgatctggctcgcgaactggagcgtgtggctgaaggcatgtggatttggaaatggatcaactacccagcagcagtaatgccgatgcgtccgagcattaatacgttgcgtttggctttaaaagagatgatccgtaccactccgggcaaaattgttttatcggcgtactctcaatcggccgtggcttttgcttacgtatggcgcgacgacattcttaaccccgatggtgaacttcacgaccgcctggatgatattgtagcagtaatcttgtacggcaacccagttcgcgcccctgggattgcttatggcaacgagttaggcggtcaatctgcccccggcaagctgaatgggcatgtcaccggcggcatcgccgggcctgattgtttgcgcccggaagagtgcgtccatcccgtcactgggcgtcgcattgtactggacttcgctaatgccggtgatttgtacgctgctgcacccgttggcgcggaaccctgggtcaaagagactgaggtaggccataacgagacgcttatttacgaagctgttatggattttaatggccgcgatatccttgcattcgccaaagagatcgcacagattcttacaatgcccttgagccaggtcgtaccgctggtacaagcaattatcaacgggttaagctttcttgtccagggcccgaaagctccgcactggacgtacacgattggcccggcagtcgattacttagtccgcacgggcaatgaacttcgtaaaaattga

SEQ ID NO: 18 - protein, 281 aa, Artificial Sequence
  LysB-Omega
MLNGEFYVPAGTIITANGTGVPDGAGPGFGADLARELERVAEGMWIWKWINYPAAVMPMRPSINTLRLALKEMIRTTPGKIVLSAYSQSAVAFAYVWRDDILNPDGELHDRLDDIVAVILYGNPVRAPGIAYGNELGGQSAPGKLNGHVTGGIAGPDCLRPEECVHPVTGRRIVLDFANAGDLYAAAPVGAEPWVKETEVGHNETLIYEAVMDFNGRDILAFAKEIAQILTMPLSQVVPLVQAIINGLSFLVQGPKAPHWTYTIGPAVDYLVRTGNELRKN

SEQ ID NO: 19 - DNA, 1002 bp, Artificial Sequence
  LysB-Saal
atgcgcatcgacggtcaatatgtgggactggggcttggggattcttcagacgagatccgtaaaatcaaggcgttcatgcgccgcaaattcgcgagctatgccggagatttagcggatactcctttgtacgatgaagctatgaccgcagcagtggccgagatgcaagcgcgctacagtgcggctggtcaacttcgtgctggattgtacattcccggtatcgtaggagccgaaactaagtatgtgatgggttacttaccccgccccgtcgttgatactcgtccggtactgatcactgtgtgtggtacgggtgttccatggtggattgggcctgatgcagatactgctcgcgctgtggaggataagtacctgtggcaaccgatcggttatcctgcagccccttttccaatgggaaaatccatcgcggcggctattaccgagactcacaaccaagccaatcgctggcgcgagcgcatcgaaactcacggcgcggccttggctggctatagccagggtgcagtggtagtgtcagagctttggatgaaccacattgcgccggaggatggttcccttcattggatgaaaccacacattgaaaaagccgtcacttgggggaacccaaatcgcgagttggggcacgtatgggcggaccacgggggttctcctcgtgcgccgtctaatacccaaggcgtttcaagtaacggaatgcgtgatacgcccccatggtggcgtgattatgctcaccagggtgacctttatgcgtgtacagagccaggggatactcaagaggtgcgtaacgcgatttggcaaattgtacgcgacttggatttatttacagggcccgacagtttgttagcccaggttgtagagttggtgcaggcccctctgcccgaagctatcgctatcacaaaggcgcttttggatgccggtatgttcttcgctaaacgtacaggcccacatgtggactataacgtacagccagcgatcgattacctgcgcacatga

SEQ ID NO: 20 - protein, 308 aa, Artificial Sequence
  LysB-Saal
MRRKFASYAGDLADTPLYDEAMTAAVAEMQARYSAAGQLRAGLYIPGIVGAETKYVMGYLPRPVVDTRPVLITVCGTGVPWWIGPDADTARAVEDKYLWQPIGYPAAPFPMGKSIAAAITETHNQANRWRERIETHGAALAGYSQGAVVVSELWMNHIAPEDGSLHWMKPHIEKAVTWGNPNRELGHVWADHGGSPRAPSNTQGVSSNGMRDTPPWWRDYAHQGDLYACTEPGDTQEVRNAIWQIVRDLDLFTGPDSLLAQVVELVQAPLPEAIAITKALLDAGMFFAKRTGPHVDYNVQPAIDYLRT

SEQ ID NO: 21 - DNA, 1038 bp, Artificial Sequence
  LysB-Ds6A
atgacctggattggctggcagcaaggtatggcgggagagccggtagccgctgcgaagcgtgagcttcgtcgcaaattcagttatgctaaacatctggatgacagcgacgtatttgatctggagttattggccgttttgatcgagtaccaacaaaaaaagaacgcgactggttatacacctcgcctgcgcgaagacggcgttcttgattgggccactcaagttgcgattggtacggtgcaaactgggccccctcctaaggcaggcacgttatttactgtgcaaggaactggcgttgatatgtggacaggacccccggcggacacggctcgtgccgtggagggcgactgggaatggcagccgattggcaattaccctgcttcaccgttcccaatgtgggcttccatctggcaggggattgaagaactgcgctttcagattcgtcgccatgctacggaaaaaccggggaaagccattgccctggcaggtttctcacagggtgccgtagtcgtaagttgggtctacaagtgggacattgcactgcccggtggcatgctgcacgacttgctgccacaggtggcagcgggtgtaacgtggggtaatcccatggcagaaaaaggcaagtttcatggtaaccgcttcgccggctggcctgtgcctgccggaatggggatcaaccgtgaccgcttggaaaatacccccgcattatggcttgactttgggcacggtcgcaattcaccttggggccaagatatttattgcgaccgcccggataatttggctggtcaggacatggagcttatttgtgacctggtcatggctcaggacctgtggcgctttgtgacagacttcgcagtaaaagctgggaacgtgatggcgtcgcctgagacggagttacccgcaatcttggatgcagttacacaagctggtatgtttttcattgttaatcgtactgccccgcatctgacttatgacgtaggtcctgccatcgattaccttcgccaagttgcgcgcgaccgccgcttggctttagccgcgtga

SEQ ID NO: 22 - protein, 345 aa, Artificial Sequence
  LysB-Ds6A
MTWIGWQQGMAGEPVAAAKRELRRKFSYAKHLDDSDVFDLELLAVLIEYQQKKNATGYTPRLREDGVLDWATQVAIGTVQTGPPPKAGTLFTVQGTGVDMWTGPPADTARAVEGDWEWQPIGNYPASPFPMWASIWQGIEELRFQIRRHATEKPGKAIALAGFSQGAVVVSWVYKWDIALPGGMLHDLLPQVAAGVTWGNPMAEKGKFHGNRFAGWPVPAGMGINRDRLENTPALWLDFGHGRNSPWGQDIYCDRPDNLAGQDMELICDLVMAQDLWRFVTDFAVKAGNVMASPETELPAILDAVTQAGMFFIVNRTAPHLTYDVGPAIDYLRQVARDRRLALAA

SEQ ID NO: 23 - DNA, 981 bp, Artificial Sequence
  LysB-Obama12
atgctgaagttaggatcaaacgggctgatggttgcggcgtggacggcagttatgcgtatccgtttcgcttcgtatgctcttggtgtaaacggtttaccgatcaaggtagatggctactttggttatgatgaagaaaaagtgcaaaaggagtatcaacgtcgtacaggacagttcccgtctggacaagtatcgcgcgaggatctgcatcgtctgggtttattgccaactttaatcagcattcacggcacaggtcaagcagacccttttggcatcgggtacccggcagacattgctcgccgcgtgcttgatctttattggtggcagccgttaggcaactacccggcgaaagctgtccctatgaacggatcggttgaccagggtgaacgtgagggcgtccgtttgatctctgacccccttatcgtgccaggtccaacagcgtttgtagattattcccaaggttcagtgattggagggcgcttacgcaaccgcatgcgccgtaaggagctgcgcggagagcttgtcgccgcagccagttttggaaatccaatgcgtctgcgcggccattacgcaggcaacgtagaccctggcggtgaaggtattgatccacgtcaagagctggctgctgaaccattccgcatcgagttagctgcgaaaggcgacttgtacacgacttgccctggcggtcagtcaggcgaaatggaacgcgccatttatcatgcggtttttagcaagttcatcggagaagatactcttatcgagcaagtatgggaacttgctaaaaatccatttcgtgaagtcccggccgccgtgaaggctattgtgcgcggcggaatgttcgcgatccgtggcacaggtcctcatgttcgctaccatattgatcaatgcccagggacgggaatgacatattacgaatacgcggtcaagcatttgcgcgacaccgcagatgcgcgtttgcgccgcattgtcgcgtctgtaacatga

SEQ ID NO: 24 - protein, 317 aa, Artificial Sequence
  LysB-Obama12
MVAAWTAVMRIRFASYALGVNGLPIKVDGYFGYDEEKVQKEYQRRTGQFPSGQVSREDLHRLGLLPTLISIHGTGQADPFGIGYPADIARRVLDLYWWQPLGNYPAKAVPMNGSVDQGEREGVRLISDPLIVPGPTAFVDYSQGSVIGGRLRNRMRRKELRGELVAAASFGNPMRLRGHYAGNVDPGGEGIDPRQELAAEPFRIELAAKGDLYTTCPGGQSGEMERAIYHAVFSKFIGEDTLIEQVWELAKNPFREVPAAVKAIVRGGMFAIRGTGPHVRYHIDQCPGTGMTYYEYAVKHLRDTADARLRRIVASVT

SEQ ID NO: 25 - DNA, 759 bp, Artificial Sequence
  LysB-Enkosi
atgtctaagcctgtgctgttgactgctagtgggacgggtgcggatatgtggtctggatatccggcggatcttgcgcgtcgcgtcgaggacctttactactttcagccaatctactatggtccaggtgggattccggcgacggtaccaatgggggcgagcgcacagtctggcgtagatatgggagtacgtctggtactggagtgcgaggctcgtccgtcgcgcgacgtccctgatgggtatgccttgtgtggctactctcaagggggcatggttgtatccgcgttgttggacgagtttcgcacgggccgccttcgccacttgaatggcaaattgatggcgggcagcacctttggaaacccgtggcgcgagcttgattctaacggcgggcgcggcatcagcgaccgtcgcattgtggggacccccgacttctgggtggatgagttcgacccaggagacatttatgcaaacgtgcctaacaatgatgtcggggatgatatgactgccatttttaagctggtacagctgcgctcactggctgacctgatcggtattggatcgattatggatcgcgtaatggacgttcttcgcggcccattgagcgggatgcgctccgtagttgaggcgattgttcgtggcttattatttttcggccgtaagccgccaacagcgccccatacagagtaccatttgcgcgaggtccgtccgggagtgacgtattttgaacatgcagtcgcccacatgcgcgctatggccgcctga

SEQ ID NO: 26 - protein, 237 aa, Artificial Sequence
  LysB-Enkosi
MWSGYPADLARRVEDLYYFQPIYYGPGGIPATVPMGASAQSGVDMGVRLVLECEARPSRDVPDGYALCGYSQGGMVVSALLDEFRTGRLRHLNGKLMAGSTFGNPWRELDSNGGRGISDRRIVGTPDFWVDEFDPGDIYANVPNNDVGDDMTAIFKLVQLRSLADLIGIGSIMDRVMDVLRGPLSGMRSVVEAIVRGLLFFGRKPPTAPHTEYHLREVRPGVTYFEHAVAHMRAMAA

SEQ ID NO: 27 - DNA, 966 bp, Artificial Sequence
  LysB-Bxz2
atgccgttacgcgtgggcagcaatgatgcaaataccggtggtcttgtatcacgctggcaaaagaccatgttagcgcgttatgccgcgtatgcgaaagcttatgatggcggcccattacgtgtggatgggtactttggttatgatgatgccgatgtgcaacgtgaatatgagcgtcgtacacatcaagttgtggatggggaagttagcgatgcggatctgcgtgccttggggttggaagccgcaaaacgttggcttttcaccgtgcatggaactggccaagcagatcctcttgggccaggcttgcctgcagataccgcccgtgccgtcctggataaatatacgtggcaaccgattggaaattatcctgcacgtgcatttccaatgtggtcgtccattatggatggcgcgcgcgaactccgttcgcaaattgcttccaaaagtggcgaagttaatctcgcaggttatagtcagggtgcagtagtggttgggcaagttctgaaacatgatattatggatcctaaaggttctctccatcatcgcttaggtgacgtgcgtaaagttgtactttggggtaacccgatgcgtcaacgtggcattgcccattttgacgaatggatccatcctgtcgctggacccgattcttatggtattttggacgatcgcctggaaggattggagaaagcgccttttgaaattcgtgattatgcccatgccggcgatatgtatgcgagcattaccgatggtgataaagatgaatataaaattgccatttgtaaaattgtgatgaccgctaccgatttctatcgcggtccaaatagcgtggtcagccagctcattgaattgggtcaacgccctctgactgaaggtattgcgatggcgcttgcaattattgatacccttcgcttctttaccaatacggctcatgggtataatattggtccggcgattgattttcttcgctcatga

SEQ ID NO: 28 - protein, 321 aa, Artificial Sequence
  LysB-Bxz2
MPLRVGSNDANTGGLVSRWQKTMLARYAAYAKAYDGGPLRVDGYFGYDDADVQREYERRTHQVVDGEVSDADLRALGLEAAKRWLFTVHGTGQADPLGPGLPADTARAVLDKYTWQPIGNYPARAFPMWSSIMDGARELRSQIASKSGEVNLAGYSQGAVVVGQVLKHDIMDPKGSLHHRLGDVRKVVLWGNPMRQRGIAHFDEWIHPVAGPDSYGILDDRLEGLEKAPFEIRDYAHAGDMYASITDGDKDEYKIAICKIVMTATDFYRGPNSVVSQLIELGQRPLTEGIAMALAIIDTLRFFTNTAHGYNIGPAIDFLRS

SEQ ID NO: 29 - DNA, 765 bp, Artificial Sequence
  LysB-L5
atgagtaaaccgtggttatttactgtgcatggaaccggacaacccgatcctcttggtcccgggctcccggcagacacagctcgtgatgttttggatatttatcgttggcaaccaattggtaattatccagccgccgcatttcccatgtggcccagcgtggagaaaggggttgccgaattaattctccaaattgaacttaaattggatgcggacccatatgccgattttgccttggcgggttattctcaaggtgcgattgttgtaggacaagttctgaaacatcatattattaatcctcgcggacgtttgcatcgttttcttcatcgtctgcgcaaagtaattttctggggcaaccccatgcgtcagaaaggtttcgcgcatactgatgaatggatccatcaagtggccgcaagtgatactatgggtattctggaagatcgtttggaaaatcttgaacagtatggtttcgaagttcgtgattatgcgcatgatggtgatatgtacgcgagtattaaagaagatgatatgcatgaatatgaagttgcgatcggtcgtattgttatgtctgcgcgtcgctttattggcggaaaagattcagtaattgcgcaactgattgaactgggccaacgcccaatttgggaaggcattgcaatggctcgcgctattattgatgcgcttaccttcttcgcgaaatctacacaggggccttcgtggcctcacctttataatcgttttccagccgtagaatttctgcgtcgcatttga

SEQ ID NO: 30 - protein, 254 aa, Artificial Sequence
  LysB-L5
MSKPWLFTVHGTGQPDPLGPGLPADTARDVLDIYRWQPIGNYPAAAFPMWPSVEKGVAELILQIELKLDADPYADFALAGYSQGAIVVGQVLKHHIINPRGRLHRFLHRLRKVIFWGNPMRQKGFAHTDEWIHQVAASDTMGILEDRLENLEQYGFEVRDYAHDGDMYASIKEDDMHEYEVAIGRIVMSARRFIGGKDSVIAQLIELGQRPIWEGIAMARAIIDALTFFAKSTQGPSWPHLYNRFPAVEFLRRI

SEQ ID NO: 31 - DNA, 999 bp, Artificial Sequence
  LysB-Ms6
atgcgtatcgacggccaatatgttggattaggaccaggggatcgttcggacgagatccgcaagatcaaagcgttcatgcgtcgcaagttctcctacgcagcgacgctggccgacactgagttctacgacgaggccatgaccgctgtagtcgccgagatgcaatcccgttacaacactgctggtcagctccgcgacgggttgtacatccccgggattatcaacgctgaaaccaagtacgttatgggatatttgtcacgtccagtaatcgacacacgtccagtcctgtttaccgtatgcggaaccggcgtgccttggtgggtcggcccagacgccgacaccgctcgcgctgttgaggaccaatatttatggcaaccgattggttatccggccgcgcccttcccaatgggtcgttccatcaccgcggggatcactgaggcacacaaccaggcgaaccgctggcgcgaacgtatcgaaactcacggcaccgccctcgcaggttattctcaaggcgcagtcgttctttctgagttatggatgaaccacatcgcaccggaagacggctcgcttcgctggatgaaaccacatgtacgtaaagcagtgacgtggggcaacccgaaccgcgaattaggccacgtgtgggccgatcacggcggctctcctatggcgccaagtaacactcagggcgtgtcgtcaaacggaatgcgcaacacgcctgactggtggcgcgactacgcccaccaaggcgacctgtacgcttgcaccgaaccgggagacacccaagaggttcgcaacgcgatctggcagatcgtccgcgacctggacctgttcaccggaccagattcactccttgcccaagtgatcgaactggcccaagcccctctccctgagacgatcgcgatcactcgcgcgatcctggacgcgggtatgttcttcgcgaaacgcacaggcccacacgtagactacaacccgcagccagcgatcgactatctccgcacgtga

SEQ ID NO: 32 - protein, 307 aa, Artificial Sequence
  LysB-Ms6
MRRKFSYAATLADTEFYDEAMTAVVAEMQSRYNTAGQLRDGLYIPGIINAETKYVMGYLSRPVIDTRPVLFTVCGTGVPWWVGPDADTARAVEDQYLWQPIGYPAAPFPMGRSITAGITEAHNQANRWRERIETHGTALAGYSQGAVVLSELWMNHIAPEDGSLRWMKPHVRKAVTWGNPNRELGHVWADHGGSPMAPSNTQGVSSNGMRNTPDWWRDYAHQGDLYACTEPGDTQEVRNAIWQIVRDLDLFTGPDSLLAQVIELAQAPLPETIAITRAILDAGMFFAKRTGPHVDYNPQPAIDYLRT

SEQ ID NO: 33 - DNA, 678 bp, Artificial Sequence
  Trehalose dimycolate hydrolase (TDMH)
atgaccatggccatcgttatctccctgcgtaaaccagcgcgcttagcggcttttgctagcgcggttttatgtgcgggagcggccttagctaccggtcctgctccagttgcgtctgccgaaccgtgtagtgatattgaagtcgttttcgcccgtggtaccagcgagcctgcaggaattgggcgtgtgggtcaagcactcacggacgccattcgtaaccaagtaggcggtcgtaccgtgagtacatatggtgtaaattatcctgcgacttatgattttcttgctgccgctgatggtgcgaatgatgctacgaatcgtattgccacattagcggaacaatgtccaagtacccgtgtggtcttaggcgggtatagtcaaggtgcagcagtagtagatatgctcttaggcattccaccgctcgggaataaagttggtaattttggcagtgcacccccattgccttcgaatctgatgaataatgtagcagcagtggccgtctttggtaatccttctgcgaaatttgggattcctgtgacatcgcgctttggtggtcgtgccattgatgcatgttcagatggagatcccatttgcagcgatggccgtaatccatttgcccatacacactatgaatcaagcccatttattcctcaagcggccggcttaattgccggcttagtatga

SEQ ID NO: 34 - protein, 225 aa, Artificial Sequence
  Trehalose dimycolate hydrolase (TDMH)
MTMAIVISLRKPARLAAFASAVLCAGAALATGPAPVASAEPCSDIEVVFARGTSEPAGIGRVGQALTDAIRNQVGGRTVSTYGVNYPATYDFLAAADGANDATNRIATLAEQCPSTRVVLGGYSQGAAVVDMLLGIPPLGNKVGNFGSAPPLPSNLMNNVAAVAVFGNPSAKFGIPVTSRFGGRAIDACSDGDPICSDGRNPFAHTHYESSPFIPQAAGLIAGLV

SEQ ID NO: 35 - DNA, 90 bp, Artificial Sequence
  Cathelicidin-BF
aaattttttcggaaactgaaaaagtccgtgaaaaagcgcgcgaaagaatttttcaaaaagccgcgggtaatcggcgtgtccattcctttt

SEQ ID NO: 36 - protein, 30 aa, Artificial Sequence
  Cathelicidin-BF
KFFRKLKKSVKKRAKEFFKKPRVIGVSIPF

SEQ ID NO: 37 - DNA, 72 bp, Artificial Sequence
  Ci-MAM-A24 (Ciona-molecule against microbes A 24-residues)
tggcgctccctgggtcgtacgctgttacgtctgtcccatgctctgaaaccgctggcgcgccgttccgggtgg

SEQ ID NO: 38 - protein, 24 aa, Artificial Sequence
  Ci-MAM-A24 (Ciona-molecule against microbes A 24-residues)
WRSLGRTLLRLSHALKPLARRSGW

SEQ ID NO: 39 - DNA, 61 bp, Artificial Sequence
  Ranalexin
tttttgggaggcttaataaagatcgttccagcaatgatttgtgcagtgaccaaaaaatgtt

SEQ ID NO: 40 - protein, 20 aa, Artificial Sequence
  Ranalexin
FLGGLIKIVPAMICAVTKKC

SEQ ID NO: 41 - DNA, 62 bp, Artificial Sequence
  Nigrocine-2
ggtctcctgtccaaagtactgggcgttggcaaaaaagtgctgtgcggtgtctctggtctggt

SEQ ID NO: 42 - protein, 21 aa, Artificial Sequence
  Nigrocine-2
GLLSKVLGVGKKVLCGVSGLC

SEQ ID NO: 43 - DNA, 66 bp, Artificial Sequence
  D-Piscidin 1 [I9K], Chain A, Moronecidin
ttcttccatcatattttccgcggcaaagtccatgtgggcaagaccattcatcgcttagtaacgggt

SEQ ID NO: 44 - protein, 22 aa, Artificial Sequence
  D-Piscidin 1 [I9K], Chain A, Moronecidin
FFHHIFRGKVHVGKTIHRLVTG

SEQ ID NO: 45 - DNA, 120 bp, Artificial Sequence
  Cecropin A
ggctggctgaaaaaaattggcaaaaaaatcgaacgcgtgggccagcacacgcgtgatgcaaccatccagggtctgggtatcccacagcaggcagctaacgtagccgcgactgctcgtggt

SEQ ID NO: 46 - protein, 40 aa, Artificial Sequence
  Cecropin A
GWLKKIGKKIERVGQHTRDATIQGLGIPQQAANVAATARG

SEQ ID NO: 47 - DNA, 54 bp, Artificial Sequence
  Protegrin-1, Chain A
cgtggcggtcgtctgtgttactgccgtcgccgtttctgcgtgtgtgttggtcgt

SEQ ID NO: 48 - protein, 18 aa, Artificial Sequence
  Protegrin-1, Chain A
RGGRLCYCRRRFCVCVGR

SEQ ID NO: 49 - DNA, 87 bp, Artificial Sequence
  SMAP-29, Sheep myeloid antimicrobial peptide
cgtggtctgcgtcgcctgggtcgcaaaattgcgcacggcgtcaaaaaatacggcccgaccgtgctgcgcattatccgcatcgctggt

SEQ ID NO: 50 - protein, 29 aa, Artificial Sequence
  SMAP-29, Sheep myeloid antimicrobial peptide
RGLRRLGRKIAHGVKKYGPTVLRIIRIAG

SEQ ID NO: 51 - DNA, 45 bp, Artificial Sequence
  Lactoferricin B (LfcinB)
tttaaatgtcgtcgctggcaatggcgtatgaaaaaactgggggcg

SEQ ID NO: 52 - protein, 15 aa, Artificial Sequence
  Lactoferricin B (LfcinB)
FKCRRWQWRMKKLGA

SEQ ID NO: 53 - DNA, 42 bp, Artificial Sequence
  IR2 (IR)2-Protegrin-1 (8-13) -(RI)2
atccggatccgttgccgtcgccggttctgccgcattcgtatt

SEQ ID NO: 54 - protein, 14 aa, Artificial Sequence
  IR2(IR)2-Protegrin-1 (8-13) -(RI)2
IRIRCRRRFCRIRI

SEQ ID NO: 55 - DNA, 42 bp, Artificial Sequence
  (FR)2-Protegrin-1 (8-13) -(FR)2
ttccgctttcgttgtcgccggcgtttttgtcggttccgcttc

SEQ ID NO: 56 - protein, 14 aa, Artificial Sequence
  (FR)2-Protegrin-1 (8-13) -(FR)2
FRFRCRRRFCRFRF

SEQ ID NO: 57 - DNA, 36 bp, Artificial Sequence
  CEM1
ggcattggtaagttcctgaaaaaagcgaagaaattt

SEQ ID NO: 58 - protein, 12 aa, Artificial Sequence
  CEM1
GIGKFLKKAKKF

SEQ ID NO: 59 - DNA, 111 bp, Artificial Sequence
  LL-37, Cathelicidin antimicrobial peptide preproprotein
ctcctgggtgacttctttcgcaaatccaaagagaaaatcggcaaagagttcaaacgtatcgtgcagcgcattaaagactttctgcgtaacctggttccgcgtaccgaatct

SEQ ID NO: 60 - protein, 37 aa, Artificial Sequence
  LL-37, Cathelicidin antimicrobial peptide preproprotein
LLGDFFRKSKEKIGKEFKRIVQRIKDFLRNLVPRTES

SEQ ID NO: 61 - DNA, 39 bp, Artificial Sequence
  Indolicidin, Cathelicidin-4 precursor
atcctgccgtggaaatggccgtggtggccatggcgtcgc

SEQ ID NO: 62 - protein, 13 aa, Artificial Sequence
  Indolicidin, Cathelicidin-4 precursor
ILPWKWPWWPWRR

SEQ ID NO: 63 - DNA, 69 bp, Artificial Sequence
  Magainin-2, Chain A
ggtatcggcaaattcctgcactccgcaaaaaaattcggcaaagctttcgtgggcgaaattatgaactct

SEQ ID NO: 64 - protein, 23 aa, Artificial Sequence
  Magainin-2, Chain A
GIGKFLHSAKKFGKAFVGEIMNS

SEQ ID NO: 65 - DNA, 108 bp, Artificial Sequence
  Cecropin A2
ggcggcctgaaaaaactgggcaaaaaactggaaggtgccggcaaacgtgtgttcaacgctgcagaaaaagcactgccggttgtagctggtgctaaagctctccgtaaa

SEQ ID NO: 66 - protein, 36 aa, Artificial Sequence
  Cecropin A2
GGLKKLGKKLEGAGKRVFNAAEKALPVVAGAKALRK

SEQ ID NO: 67 - DNA, 93 bp, Artificial Sequence
  Cecropin P1
tcttggctgagcaaaaccgcgaaaaaactggagaactccgccaaaaaacgcatctctgaaggcattgctattgcaatccagggtggtccgcgt

SEQ ID NO: 68 - protein, 31 aa, Artificial Sequence
  Cecropin P1
SWLSKTAKKLENSAKKRISEGIAIAIQGGPR

SEQ ID NO: 69 - DNA, 75 bp, Artificial Sequence
  Pleurocidin precursor
ggctggggttctttctttaaaaaagcggctcacgttggcaaacatgtaggtaaagcagctctgacccactatctg

SEQ ID NO: 70 - protein, 25 aa, Artificial Sequence
  Pleurocidin precursor
GWGSFFKKAAHVGKHVGKAALTHYL

SEQ ID NO: 71 - DNA, 63 bp, Artificial Sequence
  Buforin II
acccgtagctctcgtgctggcctgcagtttccggttggtcgcgtgcaccgtctgctccgcaaa

SEQ ID NO: 72 - protein, 21 aa, Artificial Sequence
  Buforin II
TRSSRAGLQFPVGRVHRLLRK

SEQ ID NO: 73 - DNA, 72 bp, Artificial Sequence
  Ascaphine 5
ggtatcaaagattggatcaaaggcgcagcgaaaaaactgatcaaaaccgttgcctctcacattgctaaccag

SEQ ID NO: 74 - protein, 24 aa, Artificial Sequence
  Ascaphine 5
GIKDWIKGAAKKLIKTVASHIANQ

SEQ ID NO: 75 - DNA, 75 bp, Artificial Sequence
  Tilapia Piscidin 4 (TP4)
tttatccatcacattattggtggtctgttctccgcaggtaaagcaattcatcgcctgattcggcgtcgtcggcgc

SEQ ID NO: 76 - protein, 25 aa, Artificial Sequence
  Tilapia Piscidin 4 (TP4)
FIHHIIGGLFSAGKAIHRLIRRRRR

SEQ ID NO: 77 - DNA, 75 bp, Artificial Sequence
  Epinecidin-1 prepropeptide
tttatctttcacattattaaaggtctgttccatgcggggaaaatgatccacggcttagtgacccggcgtcgccat

SEQ ID NO: 78 - protein, 25 aa, Artificial Sequence
  Epinecidin-1 prepropeptide
FIFHIIKGLFHAGKMIHGLVTRRRH

SEQ ID NO: 79 - DNA, 75 bp, Artificial Sequence
  Chrysophsin-1
ttctttggatggcttatcaaaggcgcaattcatgctgggaaagcgattcatggccttatccatcgccgtcgtcat

SEQ ID NO: 80 - protein, 25 aa, Artificial Sequence
  Chrysophsin-1
FFGWLIKGAIHAGKAIHGLIHRRRH

SEQ ID NO: 81 - DNA, 66 bp, Artificial Sequence
  Piscidin-like peptide
atctggggcttaatcgcgcacggggtgggtcatgttggacgtctgattcatggcctgattcgcggt

SEQ ID NO: 82 - protein, 22 aa, Artificial Sequence
  Piscidin-like peptide
IWGLIAHGVGHVGRLIHGLIRG

SEQ ID NO: 83 - DNA, 36 bp, Artificial Sequence
  Myxinidin
ggtattcatgatatcctgaaatatggcaaaccgagc

SEQ ID NO: 84 - protein, 12 aa, Artificial Sequence
  Myxinidin
GIHDILKYGKPS

SEQ ID NO: 85 - DNA, 66 bp, Artificial Sequence
  PAM2 (platypus antimicrobial 2)
cgcccgtgggcgggcaacggcagcgtgcatcgctataccgtgctgagcccgcgcctgaaaacccag

SEQ ID NO: 86 - protein, 22 aa, Artificial Sequence
  PAM2 (platypus antimicrobial 2)
RPWAGNGSVHRYTVLSPRLKTQ

SEQ ID NO: 87 - DNA, 69 bp, Artificial Sequence
  Pleurocidin-like peptide AP3 (23-45), NRC-13
ggctggcgcaccctgctgaaaaaagcggaagtgaaaaccgtgggcaaactggcgctgaaacattatctg

SEQ ID NO: 88 - protein, 23 aa, Artificial Sequence
  Pleurocidin-like peptide AP3 (23-45), NRC-13
GWRTLLKKAEVKTVGKLALKHYL

SEQ ID NO: 89 - DNA, 69 bp, Artificial Sequence
  3IQ2 Ras GTPase-activating-like protein IQGAP3 (759-781)
acctggctcccagcagtaattaagatccaggcgcattggcggggctatcgtcagcgtaagatttatctg

SEQ ID NO: 90 - protein, 23 aa, Artificial Sequence
  3IQ2 Ras GTPase-activating-like protein IQGAP3 (759-781)
TWLPAVIKIQAHWRGYRQRKIYL

SEQ ID NO: 91 - DNA, 75 bp, Artificial Sequence
  SSL-25, Variant and derivative from Dermcidin
agctcgcttctggaaaaagggttggacggcgccaaaaaagcggttggcggccttggtaaactggggaaagacgcc

SEQ ID NO: 92 - protein, 25 aa, Artificial Sequence
  SSL-25, Variant and derivative from Dermcidin
SSLLEKGLDGAKKAVGGLGKLGKDA

SEQ ID NO: 93 - DNA, 45 bp, Artificial Sequence
  KK-Temporin-B (G6A), (Chain A, temporinB_KKG6A)
aaaaaattactgcccatcgtcgccaatctcctgaaatccctttta

SEQ ID NO: 94 - protein, 15 aa, Artificial Sequence
  KK-Temporin-B (G6A), (Chain A, temporinB_KKG6A)
KKLLPIVANLLKSLL

SEQ ID NO: 95 - DNA, 93 bp, Artificial Sequence
  Fowlicidin-2 (1-31)
ttagtacagcgcgggcgttttggtcgtttcctgcgcaaaatccgtcgttttcgtccaaaagtcacgattacgatccagggtagtgcccgtttt

SEQ ID NO: 96 - protein, 31 aa, Artificial Sequence
  Fowlicidin-2 (1-31)
LVQRGRFGRFLRKIRRFRPKVTITIQGSARF

SEQ ID NO: 97 - DNA, 39 bp, Artificial Sequence
  E7K_I9K_IsCT, Chain A, Cytotoxic linear peptide IsCT
attctgggcaaaatttggaaaggcaaaaaaagcctgttt

SEQ ID NO: 98 - protein, 13 aa, Artificial Sequence
  E7K_I9K_IsCT, Chain A, Cytotoxic linear peptide IsCT
ILGKIWKGKKSLF

SEQ ID NO: 99 - DNA, 27 bp, Artificial Sequence
  PCNP, Polycationic nonapeptide
aaacgcaagaaacgtaagaaacgcaaa

SEQ ID NO: 100 - protein, 9 aa, Artificial Sequence
  PCNP, Polycationic nonapeptide
KRKKRKKRK

SEQ ID NO: 101 - DNA, 39 bp, Artificial Sequence
  E7K_IsCT, Chain A, Cytotoxic linear peptide IsCT
attctgggcaaaatttggaaaggcattaaaagcctgttt

SEQ ID NO: 102 - protein, 13 aa, Artificial Sequence
  E7K_IsCT, Chain A, Cytotoxic linear peptide IsCT
ILGKIWKGIKSLF

SEQ ID NO: 103 - DNA, 18 bp, Artificial Sequence
  Linker-A
gcgggtgcgggtgcgggt

SEQ ID NO: 104 - protein, 6 aa, Artificial Sequence
  Linker-A
AGAGAG

SEQ ID NO: 105 - DNA, 27 bp, Artificial Sequence
  Linker-B
ctgtctcgtttcttccacgcggaactg

SEQ ID NO: 106 - protein, 9 aa, Artificial Sequence
  Linker-B
LSRFFHAEL

SEQ ID NO: 107 - DNA, 42 bp, Artificial Sequence
  Linker-C
gttttcaaccagcgtaaagaacacaaaggttacatgctggcg

SEQ ID NO: 108 - protein, 14 aa, Artificial Sequence
  Linker-C
VFNQRKEHKGYMLA

SEQ ID NO: 109 - DNA, 48 bp, Artificial Sequence
  Linker-D
atcccgcagggtcgttctcacccggttcagccgtacccgggtgcgttc

SEQ ID NO: 110 - protein, 16 aa, Artificial Sequence
  Linker-D
IPQGRSHPVQPYPGAF

SEQ ID NO: 111 - DNA, 18 bp, Artificial Sequence
  Linker-E
ccggcggttccgccgccg

SEQ ID NO: 112 - protein, 6 aa, Artificial Sequence
  Linker-E
PAVPPP

SEQ ID NO: 113 - DNA, 39 bp, Artificial Sequence
  Linker-F
gaagcggcggcgaaagaagcggcgaaagaagcggcgaaa

SEQ ID NO: 114 - protein, 13 aa, Artificial Sequence
  Linker-F
EAAAKEAAKEAAK

SEQ ID NO: 115 - DNA, 41 bp, Artificial Sequence
  LysB_D29_Forward Primer
gcagctcttcaagaggtctcagtgcaagcaagccctggctg

SEQ ID NO: 116 - DNA, 50 bp, Artificial Sequence
  LysB_D29_Reverse Primer
cttgctcttcgcttggtctcgcctgcgatctgtcgtaggaactcgaccgc

SEQ ID NO: 117 - DNA, 51 bp, Artificial Sequence
  LysB_Omega_Forward Primer
gtagctcttccagaggtctcggtgctttgaacggtgaattttacgttccgg

SEQ ID NO: 118 - DNA, 52 bp, Artificial Sequence
  LysB_Omega_Reverse Primer
gcagctcttcgcttggtctcgcctgcatttttacgaagttcattgcccgtgc

SEQ ID NO: 119 - DNA, 47 bp, Artificial Sequence
  LysB_Saal_Forward Primer
tcagctcttccagaggtctcggtgctcgcatcgacggtcaatatgtg

SEQ ID NO: 120 - DNA, 46 bp, Artificial Sequence
  LysB_Saal_Reverse Primer
cgagctcttcccttggtctcgcctgctgtgcgcaggtaatcgatcg

SEQ ID NO: 121 - DNA, 42 bp, Artificial Sequence
  LysB_DS6A_Forward Primer
gtcgctcttccagaggtctcggtgctacctggattggctggc

SEQ ID NO: 122 - DNA, 43 bp, Artificial Sequence
  LysB_DS6A_Reverse Primer
attgctcttcgcttggtctcgcctgccgcggctaaagccaagc

SEQ ID NO: 123 - DNA, 48 bp, Artificial Sequence
  LysB_Obama 12_Forward Primer
atggctcttctagaggtctcggtgctctgaagttaggatcaaacgggc

SEQ ID NO: 124 - DNA, 47 bp, Artificial Sequence
  LysB_Obama 12_Reverse Primer
tgtgctcttcacttggtctcgcctgctgttacagacgcgacaatgcg

SEQ ID NO: 125 - DNA, 49 bp, Artificial Sequence
  LysB_Enkosi_Forward Primer
gctgctcttctagaggtctcggtgcttctaagcctgtgctgttgactgc

SEQ ID NO: 126 - DNA, 41 bp, Artificial Sequence
  LysB_Enkosi_Reverse Primer
gttgctcttcgcttggtctcacctgcggcggccatagcgcg

SEQ ID NO: 127 - DNA, 41 bp, Artificial Sequence
  LysB_Bxz2_Forward Primer
tcggctcttctagaggtctcggtgctccgttacgcgtgggc

SEQ ID NO: 128 - DNA, 49 bp, Artificial Sequence
  LysB_Bxz2_Reverse Primer
agtgctcttcacttggtctcgcctgctgagcgaagaaaatcaatcgccg

SEQ ID NO: 129 - DNA, 51 bp, Artificial Sequence
  LysB_L5_Forward Primer
cgtgctcttctagaggtctctgtgctagtaaaccgtggttatttactgtgc

SEQ ID NO: 130 - DNA, 48 bp, Artificial Sequence
  LysB_L5_Reverse Primer
gccgctcttcgcttggtctcgcctgcaatgcgacgcagaaattctacg

SEQ ID NO: 131 - DNA, 49 bp, Artificial Sequence
  LysB_Ms6_Forward Primer
ctcgctcttctagaggtctcggtgctcgtatcgacggccaatatgttgg

SEQ ID NO: 132 - DNA, 42 bp, Artificial Sequence
  LysB_Ms6_Reverse Primer
atcgctcttcgcttggtctcgcctgccgtgcggagatagtcg

SEQ ID NO: 133 - DNA, 52 bp, Artificial Sequence
  LysA_DS6A_Forward Primer
tatgctcttctagaggtctcggaagcatgttaactgtagagagcttcgctgc

SEQ ID NO: 134 - DNA, 47 bp, Artificial Sequence
  LysA_DS6A_Reverse Primer
ctagctcttcgcttggtctctgagccacgaccagcttcgcgatctgc

SEQ ID NO: 135 - DNA, 42 bp, Artificial Sequence
  LysA_BCTU_Forward Primer
gtagctcttctagaggtctcagaagcacagagcgtgtcctgc

SEQ ID NO: 136 - DNA, 53 bp, Artificial Sequence
  LysA_BCTU_Reverse Primer
gttgctcttcgcttggtctctgagccttgttcaataatgcgattatgtgtaac

SEQ ID NO: 137 - DNA, 45 bp, Artificial Sequence
  LysA_Bxb1_Forward Primer
tcagctcttctagaggtctcggaagccctcgcgtggtctatggtc

SEQ ID NO: 138 - DNA, 44 bp, Artificial Sequence
  LysA_Bxb1_Reverse Primer
cgagctcttcgcttggtctctgagcccgccgcgtgaaatttctg

SEQ ID NO: 139 - DNA, 45 bp, Artificial Sequence
  LysA_D29_Forward Primer
gtcgctcttctagaggtctcggaagcaccttgattgtaacgcgcg

SEQ ID NO: 140 - DNA, 41 bp, Artificial Sequence
  LysA_DS29_Reverse Primer
tgtgctcttcgcttggtctctgagcctaacgcgccgttgcg

SEQ ID NO: 141 - DNA, 48 bp, Artificial Sequence
  Lysa_Giles_Forward Primer
atcgctcttctagaggtctcggaagccctgtctatgcgattcagtctg

SEQ ID NO: 142 - DNA, 46 bp, Artificial Sequence
  LysA_Giles_Reverse Primer
tgtgctcttcgcttggtctctgagcccaaaaccaggccgattttgg

SEQ ID NO: 143 - DNA, 47 bp, Artificial Sequence
  LysA_Ms6_Forward Primer
actgctcttctagaggtctcggaagcactacaaaggaccaggtagcg

SEQ ID NO: 144 - DNA, 43 bp, Artificial Sequence
  LysA_Ms6_Reverse Primer
tgcgctcttcgcttggtctctgagccatgtcccagcaactccg

SEQ ID NO: 145 - DNA, 48 bp, Artificial Sequence
  LysA_TM4_Forward Primer
gctgctcttctagaggtctcggaagctcatttacgcgctttctccaag

SEQ ID NO: 146 - DNA, 41 bp, Artificial Sequence
  LysA_TM4_Reverse Primer
gtagctcttcgcttggtctctgagcctgccgcgccaccatc

SEQ ID NO: 147 - DNA, 2580 bp, Artificial Sequence
  Sequence Id1 (1B4)
atgcaccatcatcatcatcattcttctggtgtagatctgggtaccgagaacctgtacttccaatccatgcgtggcggtcgtctgtgttactgccgtcgccgtttctgcgtgtgtgttggtcgtggtgcaagcaagccctggctgttcaccgttcacggcacgggccagcccgatcccctcgggcctggcctgcctgccgatacggcacgcgacgtacttgacatctaccggtggcagcccatcggcaactaccccgctgcggccttcccgatgtggccgtcggtcgagaagggtgtcgccgagctgatcctgcagatcgagctgaagctggacgcggacccctacgcggacttcgcgatggcgggttactcgcagggagccatcgtggttggccaggtgctcaagcaccacatcctgcctccgacgggcaggctccacaggttcctgcaccggctcaagaaggtcatcttctggggtaatcccatgcggcagaagggctttgcccactctgacgagtggatccacccggtcgctgcccctgacaccctcggaatcctcgaggaccggctcgaaaacctggagcagtacggcttcgaggtccgcgactacgcccacgacggtgacatgtacgcctccatcaaagaggacgacctgcacgaatacgaggtcgccatcggccggatcgtgatgaaggccagcggcttcatcggtggccgggactccgtggtagcccagctcatcgagcttggccagcgtccgatcaccgagggaattgcgttggcgggagccatcatcgacgccctcacgttcttcgcccgctctcgtatgggcgacaagtggccgcacctctacaaccgctacccggcggtcgagttcctacgacagatcgcaggtccagccgttccacctccgggaagctcatttacgcgctttctccaagacgatcccttgctgactcgtgaacaggtaatggcagaactcatccgcgttgctgatgatgaattgaatatgcctgataaacgtggagcatgtgtgatcgcaggaatgactatctcacaggaagttggtgtgaaagataatgatcccccatttgaacgccgtttctggtgtccagcaaatcgtgcggatccagagtcttttaattatccacatgatagtgagtccaatgatggacgttcagtggggtattttcaacaacaaaagggcccaaatggtgaactttggtggggcactaccgcgagtgaaatgaatttacatagtgcagccacccaattcatgactcgtttaaaagccgcgggttataatgcctctaatgcgcaagccgcaaatgattctgctcaagctattcaacgttcaggtgttccacaagcctataaacagtggtgggatgatatcaatcgtttatatgataaagtaaaaggtagcggcggcggacccgcaccggctcccaaaccacctcaaagcggtccttggactggtgatcctgtttggttagcagatgtattacgtgcagaaggcttgaatgttgttgaactccctggttggttagatcgtggtcatggagatatgggtcgtctgtggggcgtcgtatgtcaccatactggtagtgacaatactccaagctctgaaatcgcattccatcccagcctgggtctttgttcccaaatccatcttgcccgtaatggtacggttacactttgtggcgttggtattgcgtggcacgcaggagtgggatcgtacccggggttgccggaagataatgcaaatgccgtgacaattggtattgaagcacaaaattcgggtacatacgatggtgctcctcatcgcaccaactggccggatgcacagtatgatgcgtacgtcaaatgttgtgcggctatttgtcgtcgtctgggagtccgtgcagaccatgtaatttcgcataaagagtgggcgggccgtaaacagggtaagtgggacccgggagcgattgatatgaatattttccgtgcggatgttcaacgtcgtattgatgcgcaccagccgaatggtgaagatgactttatggcggctctgagcgcggatgaacaacgtgaagttttgaatcttttgcgtgttttagcggatcgccgctttgtgagtcgttcaccttttcgtcatctcggtgaaggtccatccgagacggtagcgggctttggtttaaatacggatggactgaaccatgctcaatataccatcgaactcgcacgtctcggggatcctacccatttagcgttactccgtgaagtagctagtgcggaaggggattctcgttacccggatcgccaatatgatgcgaaattggcgaaacgtgtcttggctgagattgaaggtgcggcgaccgcgcctgcgaaaccttctactccttcagcgccaacggaaccagcaccggaagcacctactccaccggtgaaagcggcttgtgcactcagcgccgcgggctgtgtagtagcggggagcacttcaggtggtggttgtgcgttatcgacagatggtacggggaaatgtgtggtcactgcggccactgatggtggcgcggcaggctcataatagtgataatag

SEQ ID NO: 148 - protein, 855 aa, Artificial Sequence
  Sequence Id2
MHHHHHHSSGVDLGTENLYFQSMRGGRLCYCRRRFCVCVGRGASKPWLFTVHGTGQPDPLGPGLPADTARDVLDIYRWQPIGNYPAAAFPMWPSVEKGVAELILQIELKLDADPYADFAMAGYSQGAIVVGQVLKHHILPPTGRLHRFLHRLKKVIFWGNPMRQKGFAHSDEWIHPVAAPDTLGILEDRLENLEQYGFEVRDYAHDGDMYASIKEDDLHEYEVAIGRIVMKASGFIGGRDSVVAQLIELGQRPITEGIALAGAIIDALTFFARSRMGDKWPHLYNRYPAVEFLRQIAGPAVPPPGSSFTRFLQDDPLLTREQVMAELIRVADDELNMPDKRGACVIAGMTISQEVGVKDNDPPFERRFWCPANRADPESFNYPHDSESNDGRSVGYFQQQKGPNGELWWGTTASEMNLHSAATQFMTRLKAAGYNASNAQAANDSAQAIQRSGVPQAYKQWWDDINRLYDKVKGSGGGPAPAPKPPQSGPWTGDPVWLADVLRAEGLNVVELPGWLDRGHGDMGRLWGVVCHHTGSDNTPSSEIAFHPSLGLCSQIHLARNGTVTLCGVGIAWHAGVGSYPGLPEDNANAVTIGIEAQNSGTYDGAPHRTNWPDAQYDAYVKCCAAICRRLGVRADHVISHKEWAGRKQGKWDPGAIDMNIFRADVQRRIDAHQPNGEDDFMAALSADEQREVLNLLRVLADRRFVSRSPFRHLGEGPSETVAGFGLNTDGLNHAQYTIELARLGDPTHLALLREVASAEGDSRYPDRQYDAKLAKRVLAEIEGAATAPAKPSTPSAPTEPAPEAPTPPVKAACALSAAGCVVAGSTSGGGCALSTDGTGKCVVTAATDGGAAGS

SEQ ID NO: 149 - DNA, 2142 bp, Artificial Sequence
  Sequence Id3 (1B7)
atgcaccatcatcatcatcattcttctggtgtagatctgggtaccgagaacctgtacttccaatccatgaaacgcaagaaacgtaagaaacgcaaaggtgcattgaacggtgaattttacgttccggcagggacaatcattactgccaacgggacaggggttccagatggtgcggggcccggatttggtgccgatctggctcgcgaactggagcgtgtggctgaaggcatgtggatttggaaatggatcaactacccagcagcagtaatgccgatgcgtccgagcattaatacgttgcgtttggctttaaaagagatgatccgtaccactccgggcaaaattgttttatcggcgtactctcaatcggccgtggcttttgcttacgtatggcgcgacgacattcttaaccccgatggtgaacttcacgaccgcctggatgatattgtagcagtaatcttgtacggcaacccagttcgcgcccctgggattgcttatggcaacgagttaggcggtcaatctgcccccggcaagctgaatgggcatgtcaccggcggcatcgccgggcctgattgtttgcgcccggaagagtgcgtccatcccgtcactgggcgtcgcattgtactggacttcgctaatgccggtgatttgtacgctgctgcacccgttggcgcggaaccctgggtcaaagagactgaggtaggccataacgagacgcttatttacgaagctgttatggattttaatggccgcgatatccttgcattcgccaaagagatcgcacagattcttacaatgcccttgagccaggtcgtaccgctggtacaagcaattatcaacgggttaagctttcttgtccagggcccgaaagctccgcactggacgtacacgattggcccggcagtcgattacttagtccgcacgggcaatgaacttcgtaaaaatgcaggtccggcggttccgccgccgggaagcactacaaaggaccaggtagcgcagattacaattgcagaggcaaaagcccgtgggtatactcgttcagagtgtttagccattatgtctacgttttatcaggaaagcggttggaatgatactatttgggatcctacgcatacaacgtatggaatcgcgcaacaagatggtagttatccccatcgttttgatggcgcggccgcgcagattaagggtttctttgataaactggatgtttggcgtgcaaagccgggcgcatcgacagacatttggcttaatatttgttggatgcaacaagcgccgaattggccgtcggccgattattggtatgcgaatggtcgtcgtgcttatctgacagagattaaaagtcgtattgcgacggttacgccgtatctggataaatattggcctgctgacggcggcacggcggttccagatgagcctcgtccggactttaatgagttcccaatttggtcaaataataattcggcgcgttcaggtaaaccgactatgtttctgattcatacgcaggaaggcggtggtggtgatgccgcagctgaaaatttggccaaatggtttcaaaatggtaatggagtgtcctatcattataccattagccaggcaagcgacggcggcgtaaccgtagtggactgtgtagatacggatcgtgcggcgtggagcgtcggaaatgctaatagtattagtattaatttgtgttttgctggatcacgcgcgagctggatgcgcgaccaatggatgaaacaatcgaatgctattgatgttgccgcgtatctggctgttcaagatgccaagaaatatggttttacgcccttggtcgtaccgccgccgtacaccaacggccgtccggggattagcgatcatcgctgggttactgatgtatttaaatggggtacccatacggatgttggtgattggtttccttgggattattttgcggagcgcgttaatcattgggcaaatggcggtaaaacggaaccggagccacctaaagttaagcgttttcctgatgattggagcgatcgtgagattctggttgaaattcttcgccagttacgtgggtataatttgaccgggtggccacaattgggtggcaagacactggtagatgctgtggcggagttgctgggacatggctcataatagtgataatag

SEQ ID NO: 150 - protein, 709 aa, Artificial Sequence
  Sequence Id4
MHHHHHHSSGVDLGTENLYFQSMKRKKRKKRKGALNGEFYVPAGTIITANGTGVPDGAGPGFGADLARELERVAEGMWIWKWINYPAAVMPMRPSINTLRLALKEMIRTTPGKIVLSAYSQSAVAFAYVWRDDILNPDGELHDRLDDIVAVILYGNPVRAPGIAYGNELGGQSAPGKLNGHVTGGIAGPDCLRPEECVHPVTGRRIVLDFANAGDLYAAAPVGAEPWVKETEVGHNETLIYEAVMDFNGRDILAFAKEIAQILTMPLSQVVPLVQAIINGLSFLVQGPKAPHWTYTIGPAVDYLVRTGNELRKNAGPAVPPPGSTTKDQVAQITIAEAKARGYTRSECLAIMSTFYQESGWNDTIWDPTHTTYGIAQQDGSYPHRFDGAAAQIKGFFDKLDVWRAKPGASTDIWLNICWMQQAPNWPSADYWYANGRRAYLTEIKSRIATVTPYLDKYWPADGGTAVPDEPRPDFNEFPIWSNNNSARSGKPTMFLIHTQEGGGGDAAAENLAKWFQNGNGVSYHYTISQASDGGVTVVDCVDTDRAAWSVGNANSISINLCFAGSRASWMRDQWMKQSNAIDVAAYLAVQDAKKYGFTPLVVPPPYTNGRPGISDHRWVTDVFKWGTHTDVGDWFPWDYFAERVNHWANGGKTEPEPPKVKRFPDDWSDREILVEILRQLRGYNLTGWPQLGGKTLVDAVAELLGHGS

SEQ ID NO: 151 - DNA, 2706 bp, Artificial Sequence
  Sequence Id5 (1B11)
atgcaccatcatcatcatcattcttctggtgtagatctgggtaccgagaacctgtacttccaatccatgaaacgcaagaaacgtaagaaacgcaaaggtgcacgtatcgacggccaatatgttggattaggaccaggggatcgttcggacgagatccgcaagatcaaagcgttcatgcgtcgcaagttctcctacgcagcgacgctggccgacactgagttctacgacgaggccatgaccgctgtagtcgccgagatgcaatcccgttacaacactgctggtcagctccgcgacgggttgtacatccccgggattatcaacgctgaaaccaagtacgttatgggatatttgtcacgtccagtaatcgacacacgtccagtcctgtttaccgtatgcggaaccggcgtgccttggtgggtcggcccagacgccgacaccgctcgcgctgttgaggaccaatatttatggcaaccgattggttatccggccgcgcccttcccaatgggtcgttccatcaccgcggggatcactgaggcacacaaccaggcgaaccgctggcgcgaacgtatcgaaactcacggcaccgccctcgcaggttattctcaaggcgcagtcgttctttctgagttatggatgaaccacatcgcaccggaagacggctcgcttcgctggatgaaaccacatgtacgtaaagcagtgacgtggggcaacccgaaccgcgaattaggccacgtgtgggccgatcacggcggctctcctatggcgccaagtaacactcagggcgtgtcgtcaaacggaatgcgcaacacgcctgactggtggcgcgactacgcccaccaaggcgacctgtacgcttgcaccgaaccgggagacacccaagaggttcgcaacgcgatctggcagatcgtccgcgacctggacctgttcaccggaccagattcactccttgcccaagtgatcgaactggcccaagcccctctccctgagacgatcgcgatcactcgcgcgatcctggacgcgggtatgttcttcgcgaaacgcacaggcccacacgtagactacaacccgcagccagcgatcgactatctccgcacggcaggtgcgggtgcgggtgcgggtggaagcacagagcgtgtcctgccgtatgatcgtaatattgtaccacaagaaacgggttggtggtgcggtccggcagcgacgcaagttgttctgaatagtcgtggaattattgtaccggaagcgaccctggcaaatgaaattgaacaaattgaaaatccaggtcgcggtgacgatcgtgatggaacggattatgtggggcttattgaacaagtgcttgatcgccgtgtgcccgaagcgaaatatacgagcgtgtatatgcctaatgatccgcccaccgcagcccaacgcgaagctttatggcaaaatattgtgcgctccattaatgcgggctggggtgtcattatgaattgggtggcgccgccatccaataaaccacgcggagtcaaaggtagccccaatcctaaatattcaggtggtacaacttatcattatgtggcctgtatgggttatgatgatactccgggcgcccgcgccttgtggattgcggattctgggtttcaaccctttaattattggatttcgtttgatcaagcagcaacgctcattccacctaaagggtatgcgtatgccgcgacgacggctacagctcctgcgccggctccagcccctgttgatgcggcacccattttagcacgcgcagctgggattagcgaagctaaagcacgtgaaatcttacccacctttcgtgatggtttgcgcttagctgaatgtaataatgttccgcgcattgcaatgtttattgcacaaacaggccacgaaagcgataattttaatgccactcaagaatatgatcatggccgtaattatggcgatccaaatgaagcaaccgatcgttggaaatataaagggcgtacgtggatccaaattacatggcgtggtaattatgagcgtttctcacgttggtgttttgatcgtaaattggtgcctaccccaacatattttgtagataatccacgcgcactcgcggatgttcgttgggcaggaattggcgcggcgtggtattggacggtagaacgtccttccattaatcgcctgtgtgatgagcgtaatttaacggaagttactcgtctgattaatggtggcacatcgtgggaagccccaacctggatgaaacatcgtaaagaacgttatgatcgtgcgttagctgtgggtaatgatcttttaaagctgttagatggcgaagaagaagggtttctgtcggcgcttacgccgaaagagcaacgtgaactttatgatgaaattatgaaacgtgggcctagccgtagctttcttgcggatgatggtcgtcaaatcgaaacgctgctcggttttatttataatattgatggaaatgcgtggaatattgtgaatattcttggttgtttgattggtgtaccagagtgtgtcgatgatattcgtgacgttgccgaaaatggagtacgtaaaggttcatatgcagaaagtaatccctggctcgcgcaatttggtcaagaattttgtaaacgtttgcttccccttgctggtaaactgtctgaactcttgaatgcacaagaatttaaggttacacataatcgcattattgaacaaggctcataatagtgataatag

SEQ ID NO: 152 - protein, 897 aa, Artificial Sequence
  Sequence Id6
MHHHHHHSSGVDLGTENLYFQSMKRKKRKKRKGARIDGQYVGLGPGDRSDEIRKIKAFMRRKFSYAATLADTEFYDEAMTAVVAEMQSRYNTAGQLRDGLYIPGIINAETKYVMGYLSRPVIDTRPVLFTVCGTGVPWWVGPDADTARAVEDQYLWQPIGYPAAPFPMGRSITAGITEAHNQANRWRERIETHGTALAGYSQGAVVLSELWMNHIAPEDGSLRWMKPHVRKAVTWGNPNRELGHVWADHGGSPMAPSNTQGVSSNGMRNTPDWWRDYAHQGDLYACTEPGDTQEVRNAIWQIVRDLDLFTGPDSLLAQVIELAQAPLPETIAITRAILDAGMFFAKRTGPHVDYNPQPAIDYLRTAGAGAGAGGSTERVLPYDRNIVPQETGWWCGPAATQVVLNSRGIIVPEATLANEIEQIENPGRGDDRDGTDYVGLIEQVLDRRVPEAKYTSVYMPNDPPTAAQREALWQNIVRSINAGWGVIMNWVAPPSNKPRGVKGSPNPKYSGGTTYHYVACMGYDDTPGARALWIADSGFQPFNYWISFDQAATLIPPKGYAYAATTATAPAPAPAPVDAAPILARAAGISEAKAREILPTFRDGLRLAECNNVPRIAMFIAQTGHESDNFNATQEYDHGRNYGDPNEATDRWKYKGRTWIQITWRGNYERFSRWCFDRKLVPTPTYFVDNPRALADVRWAGIGAAWYWTVERPSINRLCDERNLTEVTRLINGGTSWEAPTWMKHRKERYDRALAVGNDLLKLLDGEEEGFLSALTPKEQRELYDEIMKRGPSRSFLADDGRQIETLLGFIYNIDGNAWNIVNILGCLIGVPECVDDIRDVAENGVRKGSYAESNPWLAQFGQEFCKRLLPLAGKLSELLNAQEFKVTHNRIIEQGS

SEQ ID NO: 153 - DNA, 2178 bp, Artificial Sequence
  Sequence Id7 (1C9)
atgcaccatcatcatcatcattcttctggtgtagatctgggtaccgagaacctgtacttccaatccatgttcttccatcatattttccgcggcaaagtccatgtgggcaagaccattcatcgcttagtaacgggtggtgcttctaagcctgtgctgttgactgctagtgggacgggtgcggatatgtggtctggatatccggcggatcttgcgcgtcgcgtcgaggacctttactactttcagccaatctactatggtccaggtgggattccggcgacggtaccaatgggggcgagcgcacagtctggcgtagatatgggagtacgtctggtactggagtgcgaggctcgtccgtcgcgcgacgtccctgatgggtatgccttgtgtggctactctcaagggggcatggttgtatccgcgttgttggacgagtttcgcacgggccgccttcgccacttgaatggcaaattgatggcgggcagcacctttggaaacccgtggcgcgagcttgattctaacggcgggcgcggcatcagcgaccgtcgcattgtggggacccccgacttctgggtggatgagttcgacccaggagacatttatgcaaacgtgcctaacaatgatgtcggggatgatatgactgccatttttaagctggtacagctgcgctcactggctgacctgatcggtattggatcgattatggatcgcgtaatggacgttcttcgcggcccattgagcgggatgcgctccgtagttgaggcgattgttcgtggcttattatttttcggccgtaagccgccaacagcgccccatacagagtaccatttgcgcgaggtccgtccgggagtgacgtattttgaacatgcagtcgcccacatgcgcgctatggccgccgcaggtatcccgcagggtcgttctcacccggttcagccgtacccgggtgcgttcggaagccctgtctatgcgattcagtctggaactgttatttacgccggtgccgcatcgggatatggtggtcctgaccctgcaggctggcttgttattgattctgatgatgccgagggtggcggctgtttagagtatggtcatattgtccgtgaggtaaatcgtggtgatcatgtgacggcgggtcaacgtattggacatattaatccaaataatcgtacgaatggtggagtggccccgcatcttcatgtaactgactggccacatgcgtatgggcaaggcagccgtcaaaatgtgatggcacgcttgagtggagcccgcgagccagaagcccaagcggccccaacccccacagagcaaggcactgttgttggtgacccggtttggttggcggatgtagtgcgcccaactgtagctaaatttgcggagtatcctggctggcgtaatcgtggtcacggtgattttaaggatatccgtggagttatggttcatcatacaggtgggcccgcctctgcagcctcaattgcgaatggccgcccagaccttgccggccctcttgcacagctgcatatttcgcgtgatgggacagttactgtcgtagctgtaggagtggcttggcatgcgggtgcaggcagctatccatggttaccgaccaacatgggtaattggcacttgattggtattgaatgtgagtggccatatggtgagccgggaattaatgagcgtaatgcctatacagtacgctggcgtgatccagagattattgcgctgcgtaatacatgtgcggcaattttactgcgccttggcctcggggtagatcgcctgattggccataaggattatgccggccgtgctcaaggcaagtgggacccgggaaatatgagcatggactggctgcgtggcgaggtgcgtaaagatatggatggctttgtatttcccggtgaggatattgtaaatgtgaccccgccaccagtcccggcccctgtccctgccccgccagcgactgcgaatgttcttctccatcgtggtatgagtggacctaatgttgtcaaattacagacaactctccgtcgttggtattcaaaactggcggtagacggtgattttggcccccatacagaggcatgtgtacgcgatcgccaacgcatttatgggttggacgtggatggtattgtcggaccattaactgcggccaaaatcggcctggttttgggctcataatagtgataatag

SEQ ID NO: 154 - protein, 721 aa, Artificial Sequence
  Sequence Id8
MHHHHHHSSGVDLGTENLYFQSMFFHHIFRGKVHVGKTIHRLVTGGASKPVLLTASGTGADMWSGYPADLARRVEDLYYFQPIYYGPGGIPATVPMGASAQSGVDMGVRLVLECEARPSRDVPDGYALCGYSQGGMVVSALLDEFRTGRLRHLNGKLMAGSTFGNPWRELDSNGGRGISDRRIVGTPDFWVDEFDPGDIYANVPNNDVGDDMTAIFKLVQLRSLADLIGIGSIMDRVMDVLRGPLSGMRSVVEAIVRGLLFFGRKPPTAPHTEYHLREVRPGVTYFEHAVAHMRAMAAAGIPQGRSHPVQPYPGAFGSPVYAIQSGTVIYAGAASGYGGPDPAGWLVIDSDDAEGGGCLEYGHIVREVNRGDHVTAGQRIGHINPNNRTNGGVAPHLHVTDWPHAYGQGSRQNVMARLSGAREPEAQAAPTPTEQGTVVGDPVWLADVVRPTVAKFAEYPGWRNRGHGDFKDIRGVMVHHTGGPASAASIANGRPDLAGPLAQLHISRDGTVTVVAVGVAWHAGAGSYPWLPTNMGNWHLIGIECEWPYGEPGINERNAYTVRWRDPEIIALRNTCAAILLRLGLGVDRLIGHKDYAGRAQGKWDPGNMSMDWLRGEVRKDMDGFVFPGEDIVNVTPPPVPAPVPAPPATANVLLHRGMSGPNVVKLQTTLRRWYSKLAVDGDFGPHTEACVRDRQRIYGLDVDGIVGPLTAAKIGLVLGS

SEQ ID NO: 155 - DNA, 2595 bp, Artificial Sequence
  Sequence Id9 (1E10)
atgcaccatcatcatcatcattcttctggtgtagatctgggtaccgagaacctgtacttccaatccatgtggcgctccctgggtcgtacgctgttacgtctgtcccatgctctgaaaccgctggcgcgccgttccgggtggggtgctagtaaaccgtggttatttactgtgcatggaaccggacaacccgatcctcttggtcccgggctcccggcagacacagctcgtgatgttttggatatttatcgttggcaaccaattggtaattatccagccgccgcatttcccatgtggcccagcgtggagaaaggggttgccgaattaattctccaaattgaacttaaattggatgcggacccatatgccgattttgccttggcgggttattctcaaggtgcgattgttgtaggacaagttctgaaacatcatattattaatcctcgcggacgtttgcatcgttttcttcatcgtctgcgcaaagtaattttctggggcaaccccatgcgtcagaaaggtttcgcgcatactgatgaatggatccatcaagtggccgcaagtgatactatgggtattctggaagatcgtttggaaaatcttgaacagtatggtttcgaagttcgtgattatgcgcatgatggtgatatgtacgcgagtattaaagaagatgatatgcatgaatatgaagttgcgatcggtcgtattgttatgtctgcgcgtcgctttattggcggaaaagattcagtaattgcgcaactgattgaactgggccaacgcccaatttgggaaggcattgcaatggctcgcgctattattgatgcgcttaccttcttcgcgaaatctacacaggggccttcgtggcctcacctttataatcgttttccagccgtagaatttctgcgtcgcattgcaggtgcgggtgcgggtgcgggtggaagctcatttacgcgctttctccaagacgatcccttgctgactcgtgaacaggtaatggcagaactcatccgcgttgctgatgaattgaatatgcctgataaacgtggagcatgtgtgatcgcaggaatgactatctcacaggaagttggtgtgaaagataatgatcccccatttgaacgccgtttctggtgtccagcaaatcgtgcggatccagagtcttttaattatccacatgatagtgagtccaatgatggacgttcagtggggtattttcaacaacaaaagggcccaaatggtgaactttggtggggcactaccgcgagtgaaatgaatttacatagtgcagccacccaattcatgactcgtttaaaagccgcgggttataatgcctctaatgcgcaagccgcaaatgattctgctcaagctattcaacgttcaggtgttccacaagcctataaacagtggtgggatgatatcaatcgtttatatgataaagtaaaaggtagcggcggcggacccgcaccggctcccaaaccacctcaaagcggtccttggactggtgatcctgtttggttagcagatgtattacgtgcagaaggcttgaatgttgttgaactccctggttggttagatcgtggtcatggagatatgggtcgtctgtggggcgtcgtatgtcaccatactggtagtgacaatactccaagctctgaaatcgcattccatcccagcctgggtctttgttcccaaatccatcttgcccgtaatggtacggttacactttgtggcgttggtattgcgtggcacgcaggagtgggatcgtacccggggttgccggaagataatgcaaatgccgtgacaattggtattgaagcacaaaattcgggtacatacgatggtgctcctcatcgcaccaactggccggatgcacagtatgatgcgtacgtcaaatgttgtgcggctatttgtcgtcgtctgggagtccgtgcagaccatgtaatttcgcataaagagtgggcgggccgtaaacagggtaagtgggacccgggagcgattgatatgaatattttccgtgcggatgttcaacgtcgtattgatgcgcaccagccgaatggtgaagatgactttatggcggctctgagcgcggatgaacaacgtgaagttttgaatcttttgcgtgttttagcggatcgccgctttgtgagtcgttcaccttttcgtcatctcggtgaaggtccatccgagacggtagcgggctttggtttaaatacggatggactgaaccatgctcaatataccatcgaactcgcacgtctcggggatcctacccatttagcgttactccgtgaagtagctagtgcggaaggggattctcgttacccggatcgccaatatgatgcgaaattggcgaaacgtgtcttggctgagattgaaggtgcggcgaccgcgcctgcgaaaccttctactccttcagcgccaacggaaccagcaccggaagcacctactccaccggtgaaagcggcttgtgcactcagcgccgcgggctgtgtagtagcggggagcacttcaggtggtggttgtgcgttatcgacagatggtacggggaaatgtgtggtcactgcggccactgatggtggcgcggcaggctcataatagtgataatag

SEQ ID NO: 156 - protein, 860 aa, Artificial Sequence
  Sequence Id10
MHHHHHHSSGVDLGTENLYFQSMWRSLGRTLLRLSHALKPLARRSGWGASKPWLFTVHGTGQPDPLGPGLPADTARDVLDIYRWQPIGNYPAAAFPMWPSVEKGVAELILQIELKLDADPYADFALAGYSQGAIVVGQVLKHHIINPRGRLHRFLHRLRKVIFWGNPMRQKGFAHTDEWIHQVAASDTMGILEDRLENLEQYGFEVRDYAHDGDMYASIKEDDMHEYEVAIGRIVMSARRFIGGKDSVIAQLIELGQRPIWEGIAMARAIIDALTFFAKSTQGPSWPHLYNRFPAVEFLRRIAGAGAGAGGSSFTRFLQDDPLLTREQVMAELIRVADELNMPDKRGACVIAGMTISQEVGVKDNDPPFERRFWCPANRADPESFNYPHDSESNDGRSVGYFQQQKGPNGELWWGTTASEMNLHSAATQFMTRLKAAGYNASNAQAANDSAQAIQRSGVPQAYKQWWDDINRLYDKVKGSGGGPAPAPKPPQSGPWTGDPVWLADVLRAEGLNVVELPGWLDRGHGDMGRLWGVVCHHTGSDNTPSSEIAFHPSLGLCSQIHLARNGTVTLCGVGIAWHAGVGSYPGLPEDNANAVTIGIEAQNSGTYDGAPHRTNWPDAQYDAYVKCCAAICRRLGVRADHVISHKEWAGRKQGKWDPGAIDMNIFRADVQRRIDAHQPNGEDDFMAALSADEQREVLNLLRVLADRRFVSRSPFRHLGEGPSETVAGFGLNTDGLNHAQYTIELARLGDPTHLALLREVASAEGDSRYPDRQYDAKLAKRVLAEIEGAATAPAKPSTPSAPTEPAPEAPTPPVKAACALSAAGCVVAGSTSGGGCALSTDGTGKCVVTAATDGGAAGS

SEQ ID NO: 157 - DNA, 2133 bp, Artificial Sequence
  Sequence Id11 (1G8)
atgcaccatcatcatcatcattcttctggtgtagatctgggtaccgagaacctgtacttccaatccatgggcattggtaagttcctgaaaaaagcgaagaaatttggtgctagtaaaccgtggttatttactgtgcatggaaccggacaacccgatcctcttggtcccgggctcccggcagacacagctcgtgatgttttggatatttatcgttggcaaccaattggtaattatccagccgccgcatttcccatgtggcccagcgtggagaaaggggttgccgaattaattctccaaattgaacttaaattggatgcggacccatatgccgattttgccttggcgggttattctcaaggtgcgattgttgtaggacaagttctgaaacatcatattattaatcctcgcggacgtttgcatcgttttcttcatcgtctgcgcaaagtaattttctggggcaaccccatgcgtcagaaaggtttcgcgcatactgatgaatggatccatcaagtggccgcaagtgatactatgggtattctggaagatcgtttggaaaatcttgaacagtatggtttcgaagttcgtgattatgcgcatgatggtgatatgtacgcgagtattaaagaagatgatatgcatgaatatgaagttgcgatcggtcgtattgttatgtctgcgcgtcgctttattggcggaaaagattcagtaattgcgcaactgattgaactgggccaacgcccaatttgggaaggcattgcaatggctcgcgctattattgatgcgcttaccttcttcgcgaaatctacacaggggccttcgtggcctcacctttataatcgttttccagccgtagaatttctgcgtcgcattgcaggtttaagccgcttcttccatgccgagttgggaagccctgtctatgcgattcagtctggaactgttatttacgccggtgccgcatcgggatatggtggtcctgaccctgcaggctggcttgttattgattctgatgatgccgagggtggcggctgtttagagtatggtcatattgtccgtgaggtaaatcgtggtgatcatgtgacggcgggtcaacgtattggacatattaatccaaataatcgtacgaatggtggagtggccccgcatcttcatgtaactgactggccacatgcgtatgggcaaggcagccgtcaaaatgtgatggcacgcttgagtggagcccgcgagccagaagcccaagcggccccaacccccacagagcaaggcactgttgttggtgacccggtttggttggcggatgtagtgcgcccaactgtagctaaatttgcggagtatcctggctggcgtaatcgtggtcacggtgattttaaggatatccgtggagttatggttcatcatacaggtgggcccgcctctgcagcctcaattgcgaatggccgcccagaccttgccggccctcttgcacagctgcatatttcgcgtgatgggacagttactgtcgtagctgtaggagtggcttggcatgcgggtgcaggcagctatccatggttaccgaccaacatgggtaattggcacttgattggtattgaatgtgagtggccatatggtgagccgggaattaatgagcgtaatgcctatacagtacgctggcgtgatccagagattattgcgctgcgtaatacatgtgcggcaattttactgcgccttggcctcggggtagatcgcctgattggccataaggattatgccggccgtgctcaaggcaagtgggacccgggaaatatgagcatggactggctgcgtggcgaggtgcgtaaagatatggatggctttgtatttcccggtgaggatattgtaaatgtgaccccgccaccagtcccggcccctgtccctgccccgccagcgactgcgaatgttcttctccatcgtggtatgagtggacctaatgttgtcaaattacagacaactctccgtcgttggtattcaaaactggcggtagacggtgattttggcccccatacagaggcatgtgtacgcgatcgccaacgcatttatgggttggacgtggatggtattgtcggaccattaactgcggccaaaatcggcctggttttgggctcataatagtgataatag

SEQ ID NO: 158 - protein, 706 aa, Artificial Sequence
  Sequence Id12
MHHHHHHSSGVDLGTENLYFQSMGIGKFLKKAKKFGASKPWLFTVHGTGQPDPLGPGLPADTARDVLDIYRWQPIGNYPAAAFPMWPSVEKGVAELILQIELKLDADPYADFALAGYSQGAIVVGQVLKHHIINPRGRLHRFLHRLRKVIFWGNPMRQKGFAHTDEWIHQVAASDTMGILEDRLENLEQYGFEVRDYAHDGDMYASIKEDDMHEYEVAIGRIVMSARRFIGGKDSVIAQLIELGQRPIWEGIAMARAIIDALTFFAKSTQGPSWPHLYNRFPAVEFLRRIAGLSRFFHAELGSPVYAIQSGTVIYAGAASGYGGPDPAGWLVIDSDDAEGGGCLEYGHIVREVNRGDHVTAGQRIGHINPNNRTNGGVAPHLHVTDWPHAYGQGSRQNVMARLSGAREPEAQAAPTPTEQGTVVGDPVWLADVVRPTVAKFAEYPGWRNRGHGDFKDIRGVMVHHTGGPASAASIANGRPDLAGPLAQLHISRDGTVTVVAVGVAWHAGAGSYPWLPTNMGNWHLIGIECEWPYGEPGINERNAYTVRWRDPEIIALRNTCAAILLRLGLGVDRLIGHKDYAGRAQGKWDPGNMSMDWLRGEVRKDMDGFVFPGEDIVNVTPPPVPAPVPAPPATANVLLHRGMSGPNVVKLQTTLRRWYSKLAVDGDFGPHTEACVRDRQRIYGLDVDGIVGPLTAAKIGLVLGS

SEQ ID NO: 159 - DNA, 2148 bp, Artificial Sequence
  Sequence Id13 (1H4)
atgcaccatcatcatcatcattcttctggtgtagatctgggtaccgagaacctgtacttccaatccatgttcttccatcatattttccgcggcaaagtccatgtgggcaagaccattcatcgcttagtaacgggtggtgcttctaagcctgtgctgttgactgctagtgggacgggtgcggatatgtggtctggatatccggcggatcttgcgcgtcgcgtcgaggacctttactactttcagccaatctactatggtccaggtgggattccggcgacggtaccaatgggggcgagcgcacagtctggcgtagatatgggagtacgtctggtactggagtgcgaggctcgtccgtcgcgcgacgtccctgatgggtatgccttgtgtggctactctcaagggggcatggttgtatccgcgttgttggacgagtttcgcacgggccgccttcgccacttgaatggcaaattgatggcgggcagcacctttggaaacccgtggcgcgagcttgattctaacggcgggcgcggcatcagcgaccgtcgcattgtggggacccccgacttctgggtggatgagttcgacccaggagacatttatgcaaacgtgcctaacaatgatgtcggggatgatatgactgccatttttaagctggtacagctgcgctcactggctgacctgatcggtattggatcgattatggatcgcgtaatggacgttcttcgcggcccattgagcgggatgcgctccgtagttgaggcgattgttcgtggcttattatttttcggccgtaagccgccaacagcgccccatacagagtaccatttgcgcgaggtccgtccgggagtgacgtattttgaacatgcagtcgcccacatgcgcgctatggccgccgcaggtccagccgttccacctccgggaagccctgtctatgcgattcagtctggaactgttatttacgccggtgccgcatcgggatatggtggtcctgaccctgcaggctggcttgttattgattctgatgatgccgagggtggcggctgtttagagtatggtcatattgtccgtgaggtaaatcgtggtgatcatgtgacggcgggtcaacgtattggacatattaatccaaataatcgtacgaatggtggagtggccccgcatcttcatgtaactgactggccacatgcgtatgggcaaggcagccgtcaaaatgtgatggcacgcttgagtggagcccgcgagccagaagcccaagcggccccaacccccacagagcaaggcactgttgttggtgacccggtttggttggcggatgtagtgcgcccaactgtagctaaatttgcggagtatcctggctggcgtaatcgtggtcacggtgattttaaggatatccgtggagttatggttcatcatacaggtgggcccgcctctgcagcctcaattgcgaatggccgcccagaccttgccggccctcttgcacagctgcatatttcgcgtgatgggacagttactgtcgtagctgtaggagtggcttggcatgcgggtgcaggcagctatccatggttaccgaccaacatgggtaattggcacttgattggtattgaatgtgagtggccatatggtgagccgggaattaatgagcgtaatgcctatacagtacgctggcgtgatccagagattattgcgctgcgtaatacatgtgcggcaattttactgcgccttggcctcggggtagatcgcctgattggccataaggattatgccggccgtgctcaaggcaagtgggacccgggaaatatgagcatggactggctgcgtggcgaggtgcgtaaagatatggatggctttgtatttcccggtgaggatattgtaaatgtgaccccgccaccagtcccggcccctgtccctgccccgccagcgactgcgaatgttcttctccatcgtggtatgagtggacctaatgttgtcaaattacagacaactctccgtcgttggtattcaaaactggcggtagacggtgattttggcccccatacagaggcatgtgtacgcgatcgccaacgcatttatgggttggacgtggatggtattgtcggaccattaactgcggccaaaatcggcctggttttgggctcataatagtgataatag

SEQ ID NO: 160 - protein, 711 aa, Artificial Sequence
  Sequence Id14
MHHHHHHSSGVDLGTENLYFQSMFFHHIFRGKVHVGKTIHRLVTGGASKPVLLTASGTGADMWSGYPADLARRVEDLYYFQPIYYGPGGIPATVPMGASAQSGVDMGVRLVLECEARPSRDVPDGYALCGYSQGGMVVSALLDEFRTGRLRHLNGKLMAGSTFGNPWRELDSNGGRGISDRRIVGTPDFWVDEFDPGDIYANVPNNDVGDDMTAIFKLVQLRSLADLIGIGSIMDRVMDVLRGPLSGMRSVVEAIVRGLLFFGRKPPTAPHTEYHLREVRPGVTYFEHAVAHMRAMAAAGPAVPPPGSPVYAIQSGTVIYAGAASGYGGPDPAGWLVIDSDDAEGGGCLEYGHIVREVNRGDHVTAGQRIGHINPNNRTNGGVAPHLHVTDWPHAYGQGSRQNVMARLSGAREPEAQAAPTPTEQGTVVGDPVWLADVVRPTVAKFAEYPGWRNRGHGDFKDIRGVMVHHTGGPASAASIANGRPDLAGPLAQLHISRDGTVTVVAVGVAWHAGAGSYPWLPTNMGNWHLIGIECEWPYGEPGINERNAYTVRWRDPEIIALRNTCAAILLRLGLGVDRLIGHKDYAGRAQGKWDPGNMSMDWLRGEVRKDMDGFVFPGEDIVNVTPPPVPAPVPAPPATANVLLHRGMSGPNVVKLQTTLRRWYSKLAVDGDFGPHTEACVRDRQRIYGLDVDGIVGPLTAAKIGLVLGS

SEQ ID NO: 161 - protein, 664 aa, Artificial Sequence
  58+12+108+16
GIGKFLKKAKKFMTTKDQVAQITIAEAKARGYTRSECLAIMSTFYQESGWNDTIWDPTHTTYGIAQQDGSYPHRFDGAAAQIKGFFDKLDVWRAKPGASTDIWLNICWMQQAPNWPSADYWYANGRRAYLTEIKSRIATVTPYLDKYWPADGGTAVPDEPRPDFNEFPIWSNNNSARSGKPTMFLIHTQEGGGGDAAAENLAKWFQNGNGVSYHYTISQASDGGVTVVDCVDTDRAAWSVGNANSISINLCFAGSRASWMRDQWMKQSNAIDVAAYLAVQDAKKYGFTPLVVPPPYTNGRPGISDHRWVTDVFKWGTHTDVGDWFPWDYFAERVNHWANGGKTEPEPPKVKRFPDDWSDREILVEILRQLRGYNLTGWPQLGGKTLVDAVAELLGHVFNQRKEHKGYMLAMSKPWLFTVHGTGQPDPLGPGLPADTARDVLDIYRWQPIGNYPAAAFPMWPSVEKGVAELILQIELKLDADPYADFAMAGYSQGAIVVGQVLKHHILPPTGRLHRFLHRLKKVIFWGNPMRQKGFAHSDEWIHPVAAPDTLGILEDRLENLEQYGFEVRDYAHDGDMYASIKEDDLHEYEVAIGRIVMKASGFIGGRDSVVAQLIELGQRPITEGIALAGAIIDALTFFARSRMGDKWPHLYNRYPAVEFLRQI

SEQ ID NO: 162 - protein, 838 aa, Artificial Sequence
  46+8+112+32
GWLKKIGKKIERVGQHTRDATIQGLGIPQQAANVAATARGMLTVESFAAAMGNSLSVDRYRQLFPAAVESMVACGCTTVNRAAMWLAQVGHESGGLRWMEELASGAAYEWRSDLGNTQAGDGVRFKGRGPIQITGRYNYRKVSEWAHAQGIVPTPTYFVDNPTQLASDQYGFIGVSWYWQHGGPRPGQINGFADAGDILSGSRCVNGWVTTPNGMPDRTERWNRCRAMGDQILPAGAGTDNGGDGMAWTGDPVWLEDVLRPVLGDRLRVLPSWQMYGHGDFKDIRGVMVHHTGNARETAESIRKGRPDLRGPLSNIHIAPDGTVTLVAAGVCWHAGAGSYPWLPTNNANWHMIGIECAWPTIRPNGTYDEREPWPDAQIIAMRDTCAALTKRLGWDASRVIGHKEYAGASQGKWDPGNLDMGWFRGEVAKAMRGEFDPKAPAPAPNPPADNDNGGFLMALNDKQQHDLYNAVMTIAAVAADIQTQLRGPGLRGWPQLGRNANGEALTLVDAVGVIKAIADREAGRPAVPPPMRRKFSYAATLADTEFYDEAMTAVVAEMQSRYNTAGQLRDGLYIPGIINAETKYVMGYLSRPVIDTRPVLFTVCGTGVPWWVGPDADTARAVEDQYLWQPIGYPAAPFPMGRSITAGITEAHNQANRWRERIETHGTALAGYSQGAVVLSELWMNHIAPEDGSLRWMKPHVRKAVTWGNPNRELGHVWADHGGSPMAPSNTQGVSSNGMRNTPDWWRDYAHQGDLYACTEPGDTQEVRNAIWQIVRDLDLFTGPDSLLAQVIELAQAPLPETIAITRAILDAGMFFAKRTGPHVDYNPQPAIDYLRT

SEQ ID NO: 163 - protein, 901 aa, Artificial Sequence
  36+14+110+20
KFFRKLKKSVKKRAKEFFKKPRVIGVSIPFMSFTRFLQDDPLLTREQVMAELIRVADELNMPDKRGACVIAGMTISQEVGVKDNDPPFERRFWCPANRADPESFNYPHDSESNDGRSVGYFQQQKGPNGELWWGTTASEMNLHSAATQFMTRLKAAGYNASNAQAANDSAQAIQRSGVPQAYKQWWDDINRLYDKVKGSGGGPAPAPKPPQSGPWTGDPVWLADVLRAEGLNVVELPGWLDRGHGDMGRLWGVVCHHTGSDNTPSSEIAFHPSLGLCSQIHLARNGTVTLCGVGIAWHAGVGSYPGLPEDNANAVTIGIEAQNSGTYDGAPHRTNWPDAQYDAYVKCCAAICRRLGVRADHVISHKEWAGRKQGKWDPGAIDMNIFRADVQRRIDAHQPNGEDDFMAALSADEQREVLNLLRVLADRRFVSRSPFRHLGEGPSETVAGFGLNTDGLNHAQYTIELARLGDPTHLALLREVASAEGDSRYPDRQYDAKLAKRVLAEIEGAATAPAKPSTPSAPTEPAPEAPTPPVKAACALSAAGCVVAGSTSGGGCALSTDGTGKCVVTAATDGGAAIPQGRSHPVQPYPGAFMRRKFASYAGDLADTPLYDEAMTAAVAEMQARYSAAGQLRAGLYIPGIVGAETKYVMGYLPRPVVDTRPVLITVCGTGVPWWIGPDADTARAVEDKYLWQPIGYPAAPFPMGKSIAAAITETHNQANRWRERIETHGAALAGYSQGAVVVSELWMNHIAPEDGSLHWMKPHIEKAVTWGNPNRELGHVWADHGGSPRAPSNTQGVSSNGMRDTPPWWRDYAHQGDLYACTEPGDTQEVRNAIWQIVRDLDLFTGPDSLLAQVVELVQAPLPEAIAITKALLDAGMFFAKRTGPHVDYNVQPAIDYLRT

SEQ ID NO: 164 - protein, 809 aa, Artificial Sequence
  76+2+106+30
FIHHIIGGLFSAGKAIHRLIRRRRRMTERVLPYDRNIVPQETGWWCGPAATQVVLNSRGIIVPEATLANEIEQIENPGRGDDRDGTDYVGLIEQVLDRRVPEAKYTSVYMPNDPPTAAQREALWQNIVRSINAGWGVIMNWVAPPSNKPRGVKGSPNPKYSGGTTYHYVACMGYDDTPGARALWIADSGFQPFNYWISFDQAATLIPPKGYAYAATTATAPAPAPAPVDAAPILARAAGISEAKAREILPTFRDGLRLAECNNVPRIAMFIAQTGHESDNFNATQEYDHGRNYGDPNEATDRWKYKGRTWIQITWRGNYERFSRWCFDRKLVPTPTYFVDNPRALADVRWAGIGAAWYWTVERPSINRLCDERNLTEVTRLINGGTSWEAPTWMKHRKERYDRALAVGNDLLKLLDGEEEGFLSALTPKEQRELYDEIMKRGPSRSFLADDGRQIETLLGFIYNIDGNAWNIVNILGCLIGVPECVDDIRDVAENGVRKGSYAESNPWLAQFGQEFCKRLLPLAGKLSELLNAQEFKVTHNRIIEQLSRFFHAELMSKPWLFTVHGTGQPDPLGPGLPADTARDVLDIYRWQPIGNYPAAAFPMWPSVEKGVAELILQIELKLDADPYADFALAGYSQGAIVVGQVLKHHIINPRGRLHRFLHRLRKVIFWGNPMRQKGFAHTDEWIHQVAASDTMGILEDRLENLEQYGFEVRDYAHDGDMYASIKEDDMHEYEVAIGRIVMSARRFIGGKDSVIAQLIELGQRPIWEGIAMARAIIDALTFFAKSTQGPSWPHLYNRFPAVEFLRRI

SEQ ID NO: 165 - protein, 904 aa, Artificial Sequence
  36+14+112+28
KFFRKLKKSVKKRAKEFFKKPRVIGVSIPFMSFTRFLQDDPLLTREQVMAELIRVADELNMPDKRGACVIAGMTISQEVGVKDNDPPFERRFWCPANRADPESFNYPHDSESNDGRSVGYFQQQKGPNGELWWGTTASEMNLHSAATQFMTRLKAAGYNASNAQAANDSAQAIQRSGVPQAYKQWWDDINRLYDKVKGSGGGPAPAPKPPQSGPWTGDPVWLADVLRAEGLNVVELPGWLDRGHGDMGRLWGVVCHHTGSDNTPSSEIAFHPSLGLCSQIHLARNGTVTLCGVGIAWHAGVGSYPGLPEDNANAVTIGIEAQNSGTYDGAPHRTNWPDAQYDAYVKCCAAICRRLGVRADHVISHKEWAGRKQGKWDPGAIDMNIFRADVQRRIDAHQPNGEDDFMAALSADEQREVLNLLRVLADRRFVSRSPFRHLGEGPSETVAGFGLNTDGLNHAQYTIELARLGDPTHLALLREVASAEGDSRYPDRQYDAKLAKRVLAEIEGAATAPAKPSTPSAPTEPAPEAPTPPVKAACALSAAGCVVAGSTSGGGCALSTDGTGKCVVTAATDGGAAPAVPPPMPLRVGSNDANTGGLVSRWQKTMLARYAAYAKAYDGGPLRVDGYFGYDDADVQREYERRTHQVVDGEVSDADLRALGLEAAKRWLFTVHGTGQADPLGPGLPADTARAVLDKYTWQPIGNYPARAFPMWSSIMDGARELRSQIASKSGEVNLAGYSQGAVVVGQVLKHDIMDPKGSLHHRLGDVRKVVLWGNPMRQRGIAHFDEWIHPVAGPDSYGILDDRLEGLEKAPFEIRDYAHAGDMYASITDGDKDEYKIAICKIVMTATDFYRGPNSVVSQLIELGQRPLTEGIAMALAIIDTLRFFTNTAHGYNIGPAIDFLRS

SEQ ID NO: 166 - protein, 716 aa, Artificial Sequence
  100+12+110+32
KRKKRKKRKMTTKDQVAQITIAEAKARGYTRSECLAIMSTFYQESGWNDTIWDPTHTTYGIAQQDGSYPHRFDGAAAQIKGFFDKLDVWRAKPGASTDIWLNICWMQQAPNWPSADYWYANGRRAYLTEIKSRIATVTPYLDKYWPADGGTAVPDEPRPDFNEFPIWSNNNSARSGKPTMFLIHTQEGGGGDAAAENLAKWFQNGNGVSYHYTISQASDGGVTVVDCVDTDRAAWSVGNANSISINLCFAGSRASWMRDQWMKQSNAIDVAAYLAVQDAKKYGFTPLVVPPPYTNGRPGISDHRWVTDVFKWGTHTDVGDWFPWDYFAERVNHWANGGKTEPEPPKVKRFPDDWSDREILVEILRQLRGYNLTGWPQLGGKTLVDAVAELLGHIPQGRSHPVQPYPGAFMRRKFSYAATLADTEFYDEAMTAVVAEMQSRYNTAGQLRDGLYIPGIINAETKYVMGYLSRPVIDTRPVLFTVCGTGVPWWVGPDADTARAVEDQYLWQPIGYPAAPFPMGRSITAGITEAHNQANRWRERIETHGTALAGYSQGAVVLSELWMNHIAPEDGSLRWMKPHVRKAVTWGNPNRELGHVWADHGGSPMAPSNTQGVSSNGMRNTPDWWRDYAHQGDLYACTEPGDTQEVRNAIWQIVRDLDLFTGPDSLLAQVIELAQAPLPETIAITRAILDAGMFFAKRTGPHVDYNPQPAIDYLRT

SEQ ID NO: 167 - protein, 755 aa, Artificial Sequence
  46+10+104+32
GWLKKIGKKIERVGQHTRDATIQGLGIPQQAANVAATARGMPVYAIQSGTVIYAGAASGYGGPDPAGWLVIDSDDAEGGGCLEYGHIVREVNRGDHVTAGQRIGHINPNNRTNGGVAPHLHVTDWPHAYGQGSRQNVMARLSGAREPEAQAAPTPTEQGTVVGDPVWLADVVRPTVAKFAEYPGWRNRGHGDFKDIRGVMVHHTGGPASAASIANGRPDLAGPLAQLHISRDGTVTVVAVGVAWHAGAGSYPWLPTNMGNWHLIGIECEWPYGEPGINERNAYTVRWRDPEIIALRNTCAAILLRLGLGVDRLIGHKDYAGRAQGKWDPGNMSMDWLRGEVRKDMDGFVFPGEDIVNVTPPPVPAPVPAPPATANVLLHRGMSGPNVVKLQTTLRRWYSKLAVDGDFGPHTEACVRDRQRIYGLDVDGIVGPLTAAKIGLVLAGAGAGMRRKFSYAATLADTEFYDEAMTAVVAEMQSRYNTAGQLRDGLYIPGIINAETKYVMGYLSRPVIDTRPVLFTVCGTGVPWWVGPDADTARAVEDQYLWQPIGYPAAPFPMGRSITAGITEAHNQANRWRERIETHGTALAGYSQGAVVLSELWMNHIAPEDGSLRWMKPHVRKAVTWGNPNRELGHVWADHGGSPMAPSNTQGVSSNGMRNTPDWWRDYAHQGDLYACTEPGDTQEVRNAIWQIVRDLDLFTGPDSLLAQVIELAQAPLPETIAITRAILDAGMFFAKRTGPHVDYNPQPAIDYLRT

SEQ ID NO: 168 - protein, 905 aa, Artificial Sequence
  88+14+108+28
GWRTLLKKAEVKTVGKLALKHYLMSFTRFLQDDPLLTREQVMAELIRVADELNMPDKRGACVIAGMTISQEVGVKDNDPPFERRFWCPANRADPESFNYPHDSESNDGRSVGYFQQQKGPNGELWWGTTASEMNLHSAATQFMTRLKAAGYNASNAQAANDSAQAIQRSGVPQAYKQWWDDINRLYDKVKGSGGGPAPAPKPPQSGPWTGDPVWLADVLRAEGLNVVELPGWLDRGHGDMGRLWGVVCHHTGSDNTPSSEIAFHPSLGLCSQIHLARNGTVTLCGVGIAWHAGVGSYPGLPEDNANAVTIGIEAQNSGTYDGAPHRTNWPDAQYDAYVKCCAAICRRLGVRADHVISHKEWAGRKQGKWDPGAIDMNIFRADVQRRIDAHQPNGEDDFMAALSADEQREVLNLLRVLADRRFVSRSPFRHLGEGPSETVAGFGLNTDGLNHAQYTIELARLGDPTHLALLREVASAEGDSRYPDRQYDAKLAKRVLAEIEGAATAPAKPSTPSAPTEPAPEAPTPPVKAACALSAAGCVVAGSTSGGGCALSTDGTGKCVVTAATDGGAAVFNQRKEHKGYMLAMPLRVGSNDANTGGLVSRWQKTMLARYAAYAKAYDGGPLRVDGYFGYDDADVQREYERRTHQVVDGEVSDADLRALGLEAAKRWLFTVHGTGQADPLGPGLPADTARAVLDKYTWQPIGNYPARAFPMWSSIMDGARELRSQIASKSGEVNLAGYSQGAVVVGQVLKHDIMDPKGSLHHRLGDVRKVVLWGNPMRQRGIAHFDEWIHPVAGPDSYGILDDRLEGLEKAPFEIRDYAHAGDMYASITDGDKDEYKIAICKIVMTATDFYRGPNSVVSQLIELGQRPLTEGIAMALAIIDTLRFFTNTAHGYNIGPAIDFLRS

SEQ ID NO: 169 - protein, 858 aa, Artificial Sequence
  38+14+104+18
WRSLGRTLLRLSHALKPLARRSGWMSFTRFLQDDPLLTREQVMAELIRVADELNMPDKRGACVIAGMTISQEVGVKDNDPPFERRFWCPANRADPESFNYPHDSESNDGRSVGYFQQQKGPNGELWWGTTASEMNLHSAATQFMTRLKAAGYNASNAQAANDSAQAIQRSGVPQAYKQWWDDINRLYDKVKGSGGGPAPAPKPPQSGPWTGDPVWLADVLRAEGLNVVELPGWLDRGHGDMGRLWGVVCHHTGSDNTPSSEIAFHPSLGLCSQIHLARNGTVTLCGVGIAWHAGVGSYPGLPEDNANAVTIGIEAQNSGTYDGAPHRTNWPDAQYDAYVKCCAAICRRLGVRADHVISHKEWAGRKQGKWDPGAIDMNIFRADVQRRIDAHQPNGEDDFMAALSADEQREVLNLLRVLADRRFVSRSPFRHLGEGPSETVAGFGLNTDGLNHAQYTIELARLGDPTHLALLREVASAEGDSRYPDRQYDAKLAKRVLAEIEGAATAPAKPSTPSAPTEPAPEAPTPPVKAACALSAAGCVVAGSTSGGGCALSTDGTGKCVVTAATDGGAAAGAGAGMLNGEFYVPAGTIITANGTGVPDGAGPGFGADLARELERVAEGMWIWKWINYPAAVMPMRPSINTLRLALKEMIRTTPGKIVLSAYSQSAVAFAYVWRDDILNPDGELHDRLDDIVAVILYGNPVRAPGIAYGNELGGQSAPGKLNGHVTGGIAGPDCLRPEECVHPVTGRRIVLDFANAGDLYAAAPVGAEPWVKETEVGHNETLIYEAVMDFNGRDILAFAKEIAQILTMPLSQVVPLVQAIINGLSFLVQGPKAPHWTYTIGPAVDYLVRTGNELRKN

SEQ ID NO: 170 - protein, 740 aa, Artificial Sequence
  42+12+108+28
GLLSKVLGVGKKVLCGVSGLCMTTKDQVAQITIAEAKARGYTRSECLAIMSTFYQESGWNDTIWDPTHTTYGIAQQDGSYPHRFDGAAAQIKGFFDKLDVWRAKPGASTDIWLNICWMQQAPNWPSADYWYANGRRAYLTEIKSRIATVTPYLDKYWPADGGTAVPDEPRPDFNEFPIWSNNNSARSGKPTMFLIHTQEGGGGDAAAENLAKWFQNGNGVSYHYTISQASDGGVTVVDCVDTDRAAWSVGNANSISINLCFAGSRASWMRDQWMKQSNAIDVAAYLAVQDAKKYGFTPLVVPPPYTNGRPGISDHRWVTDVFKWGTHTDVGDWFPWDYFAERVNHWANGGKTEPEPPKVKRFPDDWSDREILVEILRQLRGYNLTGWPQLGGKTLVDAVAELLGHVFNQRKEHKGYMLAMPLRVGSNDANTGGLVSRWQKTMLARYAAYAKAYDGGPLRVDGYFGYDDADVQREYERRTHQVVDGEVSDADLRALGLEAAKRWLFTVHGTGQADPLGPGLPADTARAVLDKYTWQPIGNYPARAFPMWSSIMDGARELRSQIASKSGEVNLAGYSQGAVVVGQVLKHDIMDPKGSLHHRLGDVRKVVLWGNPMRQRGIAHFDEWIHPVAGPDSYGILDDRLEGLEKAPFEIRDYAHAGDMYASITDGDKDEYKIAICKIVMTATDFYRGPNSVVSQLIELGQRPLTEGIAMALAIIDTLRFFTNTAHGYNIGPAIDFLRS

SEQ ID NO: 171 - protein, 849 aa, Artificial Sequence
  96+2+110+18
LVQRGRFGRFLRKIRRFRPKVTITIQGSARFMTERVLPYDRNIVPQETGWWCGPAATQVVLNSRGIIVPEATLANEIEQIENPGRGDDRDGTDYVGLIEQVLDRRVPEAKYTSVYMPNDPPTAAQREALWQNIVRSINAGWGVIMNWVAPPSNKPRGVKGSPNPKYSGGTTYHYVACMGYDDTPGARALWIADSGFQPFNYWISFDQAATLIPPKGYAYAATTATAPAPAPAPVDAAPILARAAGISEAKAREILPTFRDGLRLAECNNVPRIAMFIAQTGHESDNFNATQEYDHGRNYGDPNEATDRWKYKGRTWIQITWRGNYERFSRWCFDRKLVPTPTYFVDNPRALADVRWAGIGAAWYWTVERPSINRLCDERNLTEVTRLINGGTSWEAPTWMKHRKERYDRALAVGNDLLKLLDGEEEGFLSALTPKEQRELYDEIMKRGPSRSFLADDGRQIETLLGFIYNIDGNAWNIVNILGCLIGVPECVDDIRDVAENGVRKGSYAESNPWLAQFGQEFCKRLLPLAGKLSELLNAQEFKVTHNRIIEQIPQGRSHPVQPYPGAFMLNGEFYVPAGTIITANGTGVPDGAGPGFGADLARELERVAEGMWIWKWINYPAAVMPMRPSINTLRLALKEMIRTTPGKIVLSAYSQSAVAFAYVWRDDILNPDGELHDRLDDIVAVILYGNPVRAPGIAYGNELGGQSAPGKLNGHVTGGIAGPDCLRPEECVHPVTGRRIVLDFANAGDLYAAAPVGAEPWVKETEVGHNETLIYEAVMDFNGRDILAFAKEIAQILTMPLSQVVPLVQAIINGLSFLVQGPKAPHWTYTIGPAVDYLVRTGNELRKN

SEQ ID NO: 172 - protein, 711 aa, Artificial Sequence
  44+10+104+18
FFHHIFRGKVHVGKTIHRLVTGMPVYAIQSGTVIYAGAASGYGGPDPAGWLVIDSDDAEGGGCLEYGHIVREVNRGDHVTAGQRIGHINPNNRTNGGVAPHLHVTDWPHAYGQGSRQNVMARLSGAREPEAQAAPTPTEQGTVVGDPVWLADVVRPTVAKFAEYPGWRNRGHGDFKDIRGVMVHHTGGPASAASIANGRPDLAGPLAQLHISRDGTVTVVAVGVAWHAGAGSYPWLPTNMGNWHLIGIECEWPYGEPGINERNAYTVRWRDPEIIALRNTCAAILLRLGLGVDRLIGHKDYAGRAQGKWDPGNMSMDWLRGEVRKDMDGFVFPGEDIVNVTPPPVPAPVPAPPATANVLLHRGMSGPNVVKLQTTLRRWYSKLAVDGDFGPHTEACVRDRQRIYGLDVDGIVGPLTAAKIGLVLAGAGAGMLNGEFYVPAGTIITANGTGVPDGAGPGFGADLARELERVAEGMWIWKWINYPAAVMPMRPSINTLRLALKEMIRTTPGKIVLSAYSQSAVAFAYVWRDDILNPDGELHDRLDDIVAVILYGNPVRAPGIAYGNELGGQSAPGKLNGHVTGGIAGPDCLRPEECVHPVTGRRIVLDFANAGDLYAAAPVGAEPWVKETEVGHNETLIYEAVMDFNGRDILAFAKEIAQILTMPLSQVVPLVQAIINGLSFLVQGPKAPHWTYTIGPAVDYLVRTGNELRKN

SEQ ID NO: 173 - protein, 685 aa, Artificial Sequence
  64+10+112+30
GIGKFLHSAKKFGKAFVGEIMNSMPVYAIQSGTVIYAGAASGYGGPDPAGWLVIDSDDAEGGGCLEYGHIVREVNRGDHVTAGQRIGHINPNNRTNGGVAPHLHVTDWPHAYGQGSRQNVMARLSGAREPEAQAAPTPTEQGTVVGDPVWLADVVRPTVAKFAEYPGWRNRGHGDFKDIRGVMVHHTGGPASAASIANGRPDLAGPLAQLHISRDGTVTVVAVGVAWHAGAGSYPWLPTNMGNWHLIGIECEWPYGEPGINERNAYTVRWRDPEIIALRNTCAAILLRLGLGVDRLIGHKDYAGRAQGKWDPGNMSMDWLRGEVRKDMDGFVFPGEDIVNVTPPPVPAPVPAPPATANVLLHRGMSGPNVVKLQTTLRRWYSKLAVDGDFGPHTEACVRDRQRIYGLDVDGIVGPLTAAKIGLVLPAVPPPMSKPWLFTVHGTGQPDPLGPGLPADTARDVLDIYRWQPIGNYPAAAFPMWPSVEKGVAELILQIELKLDADPYADFALAGYSQGAIVVGQVLKHHIINPRGRLHRFLHRLRKVIFWGNPMRQKGFAHTDEWIHQVAASDTMGILEDRLENLEQYGFEVRDYAHDGDMYASIKEDDMHEYEVAIGRIVMSARRFIGGKDSVIAQLIELGQRPIWEGIAMARAIIDALTFFAKSTQGPSWPHLYNRFPAVEFLRRI

SEQ ID NO: 174 - protein, 705 aa, Artificial Sequence
  68+12+106+18
SWLSKTAKKLENSAKKRISEGIAIAIQGGPRMTTKDQVAQITIAEAKARGYTRSECLAIMSTFYQESGWNDTIWDPTHTTYGIAQQDGSYPHRFDGAAAQIKGFFDKLDVWRAKPGASTDIWLNICWMQQAPNWPSADYWYANGRRAYLTEIKSRIATVTPYLDKYWPADGGTAVPDEPRPDFNEFPIWSNNNSARSGKPTMFLIHTQEGGGGDAAAENLAKWFQNGNGVSYHYTISQASDGGVTVVDCVDTDRAAWSVGNANSISINLCFAGSRASWMRDQWMKQSNAIDVAAYLAVQDAKKYGFTPLVVPPPYTNGRPGISDHRWVTDVFKWGTHTDVGDWFPWDYFAERVNHWANGGKTEPEPPKVKRFPDDWSDREILVEILRQLRGYNLTGWPQLGGKTLVDAVAELLGHLSRFFHAELMLNGEFYVPAGTIITANGTGVPDGAGPGFGADLARELERVAEGMWIWKWINYPAAVMPMRPSINTLRLALKEMIRTTPGKIVLSAYSQSAVAFAYVWRDDILNPDGELHDRLDDIVAVILYGNPVRAPGIAYGNELGGQSAPGKLNGHVTGGIAGPDCLRPEECVHPVTGRRIVLDFANAGDLYAAAPVGAEPWVKETEVGHNETLIYEAVMDFNGRDILAFAKEIAQILTMPLSQVVPLVQAIINGLSFLVQGPKAPHWTYTIGPAVDYLVRTGNELRKN

SEQ ID NO: 175 - protein, 653 aa, Artificial Sequence
  100+12+104+16
KRKKRKKRKMTTKDQVAQITIAEAKARGYTRSECLAIMSTFYQESGWNDTIWDPTHTTYGIAQQDGSYPHRFDGAAAQIKGFFDKLDVWRAKPGASTDIWLNICWMQQAPNWPSADYWYANGRRAYLTEIKSRIATVTPYLDKYWPADGGTAVPDEPRPDFNEFPIWSNNNSARSGKPTMFLIHTQEGGGGDAAAENLAKWFQNGNGVSYHYTISQASDGGVTVVDCVDTDRAAWSVGNANSISINLCFAGSRASWMRDQWMKQSNAIDVAAYLAVQDAKKYGFTPLVVPPPYTNGRPGISDHRWVTDVFKWGTHTDVGDWFPWDYFAERVNHWANGGKTEPEPPKVKRFPDDWSDREILVEILRQLRGYNLTGWPQLGGKTLVDAVAELLGHAGAGAGMSKPWLFTVHGTGQPDPLGPGLPADTARDVLDIYRWQPIGNYPAAAFPMWPSVEKGVAELILQIELKLDADPYADFAMAGYSQGAIVVGQVLKHHILPPTGRLHRFLHRLKKVIFWGNPMRQKGFAHSDEWIHPVAAPDTLGILEDRLENLEQYGFEVRDYAHDGDMYASIKEDDLHEYEVAIGRIVMKASGFIGGRDSVVAQLIELGQRPITEGIALAGAIIDALTFFARSRMGDKWPHLYNRYPAVEFLRQI

SEQ ID NO: 176 - protein, 832 aa, Artificial Sequence
  88+8+110+20
GWRTLLKKAEVKTVGKLALKHYLMLTVESFAAAMGNSLSVDRYRQLFPAAVESMVACGCTTVNRAAMWLAQVGHESGGLRWMEELASGAAYEWRSDLGNTQAGDGVRFKGRGPIQITGRYNYRKVSEWAHAQGIVPTPTYFVDNPTQLASDQYGFIGVSWYWQHGGPRPGQINGFADAGDILSGSRCVNGWVTTPNGMPDRTERWNRCRAMGDQILPAGAGTDNGGDGMAWTGDPVWLEDVLRPVLGDRLRVLPSWQMYGHGDFKDIRGVMVHHTGNARETAESIRKGRPDLRGPLSNIHIAPDGTVTLVAAGVCWHAGAGSYPWLPTNNANWHMIGIECAWPTIRPNGTYDEREPWPDAQIIAMRDTCAALTKRLGWDASRVIGHKEYAGASQGKWDPGNLDMGWFRGEVAKAMRGEFDPKAPAPAPNPPADNDNGGFLMALNDKQQHDLYNAVMTIAAVAADIQTQLRGPGLRGWPQLGRNANGEALTLVDAVGVIKAIADREAGRIPQGRSHPVQPYPGAFMRRKFASYAGDLADTPLYDEAMTAAVAEMQARYSAAGQLRAGLYIPGIVGAETKYVMGYLPRPVVDTRPVLITVCGTGVPWWIGPDADTARAVEDKYLWQPIGYPAAPFPMGKSIAAAITETHNQANRWRERIETHGAALAGYSQGAVVVSELWMNHIAPEDGSLHWMKPHIEKAVTWGNPNRELGHVWADHGGSPRAPSNTQGVSSNGMRDTPPWWRDYAHQGDLYACTEPGDTQEVRNAIWQIVRDLDLFTGPDSLLAQVVELVQAPLPEAIAITKALLDAGMFFAKRTGPHVDYNVQPAIDYLRT

SEQ ID NO: 177 - protein, 831 aa, Artificial Sequence
  98+8+110+24
ILGKIWKGKKSLFMLTVESFAAAMGNSLSVDRYRQLFPAAVESMVACGCTTVNRAAMWLAQVGHESGGLRWMEELASGAAYEWRSDLGNTQAGDGVRFKGRGPIQITGRYNYRKVSEWAHAQGIVPTPTYFVDNPTQLASDQYGFIGVSWYWQHGGPRPGQINGFADAGDILSGSRCVNGWVTTPNGMPDRTERWNRCRAMGDQILPAGAGTDNGGDGMAWTGDPVWLEDVLRPVLGDRLRVLPSWQMYGHGDFKDIRGVMVHHTGNARETAESIRKGRPDLRGPLSNIHIAPDGTVTLVAAGVCWHAGAGSYPWLPTNNANWHMIGIECAWPTIRPNGTYDEREPWPDAQIIAMRDTCAALTKRLGWDASRVIGHKEYAGASQGKWDPGNLDMGWFRGEVAKAMRGEFDPKAPAPAPNPPADNDNGGFLMALNDKQQHDLYNAVMTIAAVAADIQTQLRGPGLRGWPQLGRNANGEALTLVDAVGVIKAIADREAGRIPQGRSHPVQPYPGAFMVAAWTAVMRIRFASYALGVNGLPIKVDGYFGYDEEKVQKEYQRRTGQFPSGQVSREDLHRLGLLPTLISIHGTGQADPFGIGYPADIARRVLDLYWWQPLGNYPAKAVPMNGSVDQGEREGVRLISDPLIVPGPTAFVDYSQGSVIGGRLRNRMRRKELRGELVAAASFGNPMRLRGHYAGNVDPGGEGIDPRQELAAEPFRIELAAKGDLYTTCPGGQSGEMERAIYHAVFSKFIGEDTLIEQVWELAKNPFREVPAAVKAIVRGGMFAIRGTGPHVRYHIDQCPGTGMTYYEYAVKHLRDTADARLRRIVASVT

SEQ ID NO: 178 - protein, 696 aa, Artificial Sequence
  92+12+104+18
SSLLEKGLDGAKKAVGGLGKLGKDAMTTKDQVAQITIAEAKARGYTRSECLAIMSTFYQESGWNDTIWDPTHTTYGIAQQDGSYPHRFDGAAAQIKGFFDKLDVWRAKPGASTDIWLNICWMQQAPNWPSADYWYANGRRAYLTEIKSRIATVTPYLDKYWPADGGTAVPDEPRPDFNEFPIWSNNNSARSGKPTMFLIHTQEGGGGDAAAENLAKWFQNGNGVSYHYTISQASDGGVTVVDCVDTDRAAWSVGNANSISINLCFAGSRASWMRDQWMKQSNAIDVAAYLAVQDAKKYGFTPLVVPPPYTNGRPGISDHRWVTDVFKWGTHTDVGDWFPWDYFAERVNHWANGGKTEPEPPKVKRFPDDWSDREILVEILRQLRGYNLTGWPQLGGKTLVDAVAELLGHAGAGAGMLNGEFYVPAGTIITANGTGVPDGAGPGFGADLARELERVAEGMWIWKWINYPAAVMPMRPSINTLRLALKEMIRTTPGKIVLSAYSQSAVAFAYVWRDDILNPDGELHDRLDDIVAVILYGNPVRAPGIAYGNELGGQSAPGKLNGHVTGGIAGPDCLRPEECVHPVTGRRIVLDFANAGDLYAAAPVGAEPWVKETEVGHNETLIYEAVMDFNGRDILAFAKEIAQILTMPLSQVVPLVQAIINGLSFLVQGPKAPHWTYTIGPAVDYLVRTGNELRKN

SEQ ID NO: 179 - protein, 653 aa, Artificial Sequence; identical to SEQ ID NO: 175
  100+12+104+16

SEQ ID NO: 180 - protein, 796 aa, Artificial Sequence
  52+2+112+30
FKCRRWQWRMKKLGAMTERVLPYDRNIVPQETGWWCGPAATQVVLNSRGIIVPEATLANEIEQIENPGRGDDRDGTDYVGLIEQVLDRRVPEAKYTSVYMPNDPPTAAQREALWQNIVRSINAGWGVIMNWVAPPSNKPRGVKGSPNPKYSGGTTYHYVACMGYDDTPGARALWIADSGFQPFNYWISFDQAATLIPPKGYAYAATTATAPAPAPAPVDAAPILARAAGISEAKAREILPTFRDGLRLAECNNVPRIAMFIAQTGHESDNFNATQEYDHGRNYGDPNEATDRWKYKGRTWIQITWRGNYERFSRWCFDRKLVPTPTYFVDNPRALADVRWAGIGAAWYWTVERPSINRLCDERNLTEVTRLINGGTSWEAPTWMKHRKERYDRALAVGNDLLKLLDGEEEGFLSALTPKEQRELYDEIMKRGPSRSFLADDGRQIETLLGFIYNIDGNAWNIVNILGCLIGVPECVDDIRDVAENGVRKGSYAESNPWLAQFGQEFCKRLLPLAGKLSELLNAQEFKVTHNRIIEQPAVPPPMSKPWLFTVHGTGQPDPLGPGLPADTARDVLDIYRWQPIGNYPAAAFPMWPSVEKGVAELILQIELKLDADPYADFALAGYSQGAIVVGQVLKHHIINPRGRLHRFLHRLRKVIFWGNPMRQKGFAHTDEWIHQVAASDTMGILEDRLENLEQYGFEVRDYAHDGDMYASIKEDDMHEYEVAIGRIVMSARRFIGGKDSVIAQLIELGQRPIWEGIAMARAIIDALTFFAKSTQGPSWPHLYNRFPAVEFLRRI

SEQ ID NO: 181 - protein, 785 aa, Artificial Sequence
  44+6+110+30
FFHHIFRGKVHVGKTIHRLVTGMTLIVTRDHAQWVHDMCRARAGNRYGYGGAFTLNPRDTTDCSGLVLQTAAWYGGRKDWIGNRYGSTESFRLDHKIVYDLGFRRLPPGGVAALGFTPVMLVGLQHGGGGRYSHTACTLMTMDIPGGPVKVSQRGVDWESRGEVNGVGVFLYDGARAWNDPLFHDFWYLDAKLEDGPTQSVDAAEILARATGLAYNRAVALLPAVRDGLIQADCTNPNRIAMWLAQIGHESDDFKATAEYASGDAYDTRTDLGNTPEVDGDGRLYKGRSWIMITGKDNYRDFSRWAHGRGLVPTPDYFVVHPLELSELRWAGIGAAWYWTVERPDINALSDRRDLETVTRRINGGLTNLDDRRRRYNLALAVGDQLLTLIGDDDELADPTIQRFIREIHGALFNTVVTQSPYGDPQNPDGSEPRSNLWQLHELIKNGDGMGHARYVEESARAGDLRELERVVRAAKGLGRDRSPEFIARARNVLAQIEAANPEYLQAYIARNGALIPQGRSHPVQPYPGAFMSKPWLFTVHGTGQPDPLGPGLPADTARDVLDIYRWQPIGNYPAAAFPMWPSVEKGVAELILQIELKLDADPYADFALAGYSQGAIVVGQVLKHHIINPRGRLHRFLHRLRKVIFWGNPMRQKGFAHTDEWIHQVAASDTMGILEDRLENLEQYGFEVRDYAHDGDMYASIKEDDMHEYEVAIGRIVMSARRFIGGKDSVIAQLIELGQRPIWEGIAMARAIIDALTFFAKSTQGPSWPHLYNRFPAVEFLRRI

SEQ ID NO: 182 - protein, 686 aa, Artificial Sequence
  38+10+112+16
WRSLGRTLLRLSHALKPLARRSGWMPVYAIQSGTVIYAGAASGYGGPDPAGWLVIDSDDAEGGGCLEYGHIVREVNRGDHVTAGQRIGHINPNNRTNGGVAPHLHVTDWPHAYGQGSRQNVMARLSGAREPEAQAAPTPTEQGTVVGDPVWLADVVRPTVAKFAEYPGWRNRGHGDFKDIRGVMVHHTGGPASAASIANGRPDLAGPLAQLHISRDGTVTVVAVGVAWHAGAGSYPWLPTNMGNWHLIGIECEWPYGEPGINERNAYTVRWRDPEIIALRNTCAAILLRLGLGVDRLIGHKDYAGRAQGKWDPGNMSMDWLRGEVRKDMDGFVFPGEDIVNVTPPPVPAPVPAPPATANVLLHRGMSGPNVVKLQTTLRRWYSKLAVDGDFGPHTEACVRDRQRIYGLDVDGIVGPLTAAKIGLVLPAVPPPMSKPWLFTVHGTGQPDPLGPGLPADTARDVLDIYRWQPIGNYPAAAFPMWPSVEKGVAELILQIELKLDADPYADFAMAGYSQGAIVVGQVLKHHILPPTGRLHRFLHRLKKVIFWGNPMRQKGFAHSDEWIHPVAAPDTLGILEDRLENLEQYGFEVRDYAHDGDMYASIKEDDLHEYEVAIGRIVMKASGFIGGRDSVVAQLIELGQRPITEGIALAGAIIDALTFFARSRMGDKWPHLYNRYPAVEFLRQI

SEQ ID NO: 183 - protein, 685 aa, Artificial Sequence
  94+10+108+16
KKLLPIVANLLKSLLMPVYAIQSGTVIYAGAASGYGGPDPAGWLVIDSDDAEGGGCLEYGHIVREVNRGDHVTAGQRIGHINPNNRTNGGVAPHLHVTDWPHAYGQGSRQNVMARLSGAREPEAQAAPTPTEQGTVVGDPVWLADVVRPTVAKFAEYPGWRNRGHGDFKDIRGVMVHHTGGPASAASIANGRPDLAGPLAQLHISRDGTVTVVAVGVAWHAGAGSYPWLPTNMGNWHLIGIECEWPYGEPGINERNAYTVRWRDPEIIALRNTCAAILLRLGLGVDRLIGHKDYAGRAQGKWDPGNMSMDWLRGEVRKDMDGFVFPGEDIVNVTPPPVPAPVPAPPATANVLLHRGMSGPNVVKLQTTLRRWYSKLAVDGDFGPHTEACVRDRQRIYGLDVDGIVGPLTAAKIGLVLVFNQRKEHKGYMLAMSKPWLFTVHGTGQPDPLGPGLPADTARDVLDIYRWQPIGNYPAAAFPMWPSVEKGVAELILQIELKLDADPYADFAMAGYSQGAIVVGQVLKHHILPPTGRLHRFLHRLKKVIFWGNPMRQKGFAHSDEWIHPVAAPDTLGILEDRLENLEQYGFEVRDYAHDGDMYASIKEDDLHEYEVAIGRIVMKASGFIGGRDSVVAQLIELGQRPITEGIALAGAIIDALTFFARSRMGDKWPHLYNRYPAVEFLRQI

SEQ ID NO: 184 - protein, 796 aa, Artificial Sequence
  52+2+112+16
FKCRRWQWRMKKLGAMTERVLPYDRNIVPQETGWWCGPAATQVVLNSRGIIVPEATLANEIEQIENPGRGDDRDGTDYVGLIEQVLDRRVPEAKYTSVYMPNDPPTAAQREALWQNIVRSINAGWGVIMNWVAPPSNKPRGVKGSPNPKYSGGTTYHYVACMGYDDTPGARALWIADSGFQPFNYWISFDQAATLIPPKGYAYAATTATAPAPAPAPVDAAPILARAAGISEAKAREILPTFRDGLRLAECNNVPRIAMFIAQTGHESDNFNATQEYDHGRNYGDPNEATDRWKYKGRTWIQITWRGNYERFSRWCFDRKLVPTPTYFVDNPRALADVRWAGIGAAWYWTVERPSINRLCDERNLTEVTRLINGGTSWEAPTWMKHRKERYDRALAVGNDLLKLLDGEEEGFLSALTPKEQRELYDEIMKRGPSRSFLADDGRQIETLLGFIYNIDGNAWNIVNILGCLIGVPECVDDIRDVAENGVRKGSYAESNPWLAQFGQEFCKRLLPLAGKLSELLNAQEFKVTHNRIIEQPAVPPPMSKPWLFTVHGTGQPDPLGPGLPADTARDVLDIYRWQPIGNYPAAAFPMWPSVEKGVAELILQIELKLDADPYADFAMAGYSQGAIVVGQVLKHHILPPTGRLHRFLHRLKKVIFWGNPMRQKGFAHSDEWIHPVAAPDTLGILEDRLENLEQYGFEVRDYAHDGDMYASIKEDDLHEYEVAIGRIVMKASGFIGGRDSVVAQLIELGQRPITEGIALAGAIIDALTFFARSRMGDKWPHLYNRYPAVEFLRQI

SEQ ID NO: 185 - protein, 875 aa, Artificial Sequence
  96+6+112+22
LVQRGRFGRFLRKIRRFRPKVTITIQGSARFMTLIVTRDHAQWVHDMCRARAGNRYGYGGAFTLNPRDTTDCSGLVLQTAAWYGGRKDWIGNRYGSTESFRLDHKIVYDLGFRRLPPGGVAALGFTPVMLVGLQHGGGGRYSHTACTLMTMDIPGGPVKVSQRGVDWESRGEVNGVGVFLYDGARAWNDPLFHDFWYLDAKLEDGPTQSVDAAEILARATGLAYNRAVALLPAVRDGLIQADCTNPNRIAMWLAQIGHESDDFKATAEYASGDAYDTRTDLGNTPEVDGDGRLYKGRSWIMITGKDNYRDFSRWAHGRGLVPTPDYFVVHPLELSELRWAGIGAAWYWTVERPDINALSDRRDLETVTRRINGGLTNLDDRRRRYNLALAVGDQLLTLIGDDDELADPTIQRFIREIHGALFNTVVTQSPYGDPQNPDGSEPRSNLWQLHELIKNGDGMGHARYVEESARAGDLRELERVVRAAKGLGRDRSPEFIARARNVLAQIEAANPEYLQAYIARNGALPAVPPPMTWIGWQQGMAGEPVAAAKRELRRKFSYAKHLDDSDVFDLELLAVLIEYQQKKNATGYTPRLREDGVLDWATQVAIGTVQTGPPPKAGTLFTVQGTGVDMWTGPPADTARAVEGDWEWQPIGNYPASPFPMWASIWQGIEELRFQIRRHATEKPGKAIALAGFSQGAVVVSWVYKWDIALPGGMLHDLLPQVAAGVTWGNPMAEKGKFHGNRFAGWPVPAGMGINRDRLENTPALWLDFGHGRNSPWGQDIYCDRPDNLAGQDMELICDLVMAQDLWRFVTDFAVKAGNVMASPETELPAILDAVTQAGMFFIVNRTAPHLTYDVGPAIDYLRQVARDRRLALAA

SEQ ID NO: 186 - protein, 710 aa, Artificial Sequence
  98+10+108+18
ILGKIWKGKKSLFMPVYAIQSGTVIYAGAASGYGGPDPAGWLVIDSDDAEGGGCLEYGHIVREVNRGDHVTAGQRIGHINPNNRTNGGVAPHLHVTDWPHAYGQGSRQNVMARLSGAREPEAQAAPTPTEQGTVVGDPVWLADVVRPTVAKFAEYPGWRNRGHGDFKDIRGVMVHHTGGPASAASIANGRPDLAGPLAQLHISRDGTVTVVAVGVAWHAGAGSYPWLPTNMGNWHLIGIECEWPYGEPGINERNAYTVRWRDPEIIALRNTCAAILLRLGLGVDRLIGHKDYAGRAQGKWDPGNMSMDWLRGEVRKDMDGFVFPGEDIVNVTPPPVPAPVPAPPATANVLLHRGMSGPNVVKLQTTLRRWYSKLAVDGDFGPHTEACVRDRQRIYGLDVDGIVGPLTAAKIGLVLVFNQRKEHKGYMLAMLNGEFYVPAGTIITANGTGVPDGAGPGFGADLARELERVAEGMWIWKWINYPAAVMPMRPSINTLRLALKEMIRTTPGKIVLSAYSQSAVAFAYVWRDDILNPDGELHDRLDDIVAVILYGNPVRAPGIAYGNELGGQSAPGKLNGHVTGGIAGPDCLRPEECVHPVTGRRIVLDFANAGDLYAAAPVGAEPWVKETEVGHNETLIYEAVMDFNGRDILAFAKEIAQILTMPLSQVVPLVQAIINGLSFLVQGPKAPHWTYTIGPAVDYLVRTGNELRKN

SEQ ID NO: 187 - protein, 848 aa, Artificial Sequence
  56+2+104+32
FRFRCRRRFCRFRFMTERVLPYDRNIVPQETGWWCGPAATQVVLNSRGIIVPEATLANEIEQIENPGRGDDRDGTDYVGLIEQVLDRRVPEAKYTSVYMPNDPPTAAQREALWQNIVRSINAGWGVIMNWVAPPSNKPRGVKGSPNPKYSGGTTYHYVACMGYDDTPGARALWIADSGFQPFNYWISFDQAATLIPPKGYAYAATTATAPAPAPAPVDAAPILARAAGISEAKAREILPTFRDGLRLAECNNVPRIAMFIAQTGHESDNFNATQEYDHGRNYGDPNEATDRWKYKGRTWIQITWRGNYERFSRWCFDRKLVPTPTYFVDNPRALADVRWAGIGAAWYWTVERPSINRLCDERNLTEVTRLINGGTSWEAPTWMKHRKERYDRALAVGNDLLKLLDGEEEGFLSALTPKEQRELYDEIMKRGPSRSFLADDGRQIETLLGFIYNIDGNAWNIVNILGCLIGVPECVDDIRDVAENGVRKGSYAESNPWLAQFGQEFCKRLLPLAGKLSELLNAQEFKVTHNRIIEQAGAGAGMRRKFSYAATLADTEFYDEAMTAVVAEMQSRYNTAGQLRDGLYIPGIINAETKYVMGYLSRPVIDTRPVLFTVCGTGVPWWVGPDADTARAVEDQYLWQPIGYPAAPFPMGRSITAGITEAHNQANRWRERIETHGTALAGYSQGAVVLSELWMNHIAPEDGSLRWMKPHVRKAVTWGNPNRELGHVWADHGGSPMAPSNTQGVSSNGMRNTPDWWRDYAHQGDLYACTEPGDTQEVRNAIWQIVRDLDLFTGPDSLLAQVIELAQAPLPETIAITRAILDAGMFFAKRTGPHVDYNPQPAIDYLRT

SEQ ID NO: 188 - protein, 803 aa, Artificial Sequence
  68+8+104+18
SWLSKTAKKLENSAKKRISEGIAIAIQGGPRMLTVESFAAAMGNSLSVDRYRQLFPAAVESMVACGCTTVNRAAMWLAQVGHESGGLRWMEELASGAAYEWRSDLGNTQAGDGVRFKGRGPIQITGRYNYRKVSEWAHAQGIVPTPTYFVDNPTQLASDQYGFIGVSWYWQHGGPRPGQINGFADAGDILSGSRCVNGWVTTPNGMPDRTERWNRCRAMGDQILPAGAGTDNGGDGMAWTGDPVWLEDVLRPVLGDRLRVLPSWQMYGHGDFKDIRGVMVHHTGNARETAESIRKGRPDLRGPLSNIHIAPDGTVTLVAAGVCWHAGAGSYPWLPTNNANWHMIGIECAWPTIRPNGTYDEREPWPDAQIIAMRDTCAALTKRLGWDASRVIGHKEYAGASQGKWDPGNLDMGWFRGEVAKAMRGEFDPKAPAPAPNPPADNDNGGFLMALNDKQQHDLYNAVMTIAAVAADIQTQLRGPGLRGWPQLGRNANGEALTLVDAVGVIKAIADREAGRAGAGAGMLNGEFYVPAGTIITANGTGVPDGAGPGFGADLARELERVAEGMWIWKWINYPAAVMPMRPSINTLRLALKEMIRTTPGKIVLSAYSQSAVAFAYVWRDDILNPDGELHDRLDDIVAVILYGNPVRAPGIAYGNELGGQSAPGKLNGHVTGGIAGPDCLRPEECVHPVTGRRIVLDFANAGDLYAAAPVGAEPWVKETEVGHNETLIYEAVMDFNGRDILAFAKEIAQILTMPLSQVVPLVQAIINGLSFLVQGPKAPHWTYTIGPAVDYLVRTGNELRKN

SEQ ID NO: 189 - protein, 828 aa, Artificial Sequence
  44+6+112+32
FFHHIFRGKVHVGKTIHRLVTGMTLIVTRDHAQWVHDMCRARAGNRYGYGGAFTLNPRDTTDCSGLVLQTAAWYGGRKDWIGNRYGSTESFRLDHKIVYDLGFRRLPPGGVAALGFTPVMLVGLQHGGGGRYSHTACTLMTMDIPGGPVKVSQRGVDWESRGEVNGVGVFLYDGARAWNDPLFHDFWYLDAKLEDGPTQSVDAAEILARATGLAYNRAVALLPAVRDGLIQADCTNPNRIAMWLAQIGHESDDFKATAEYASGDAYDTRTDLGNTPEVDGDGRLYKGRSWIMITGKDNYRDFSRWAHGRGLVPTPDYFVVHPLELSELRWAGIGAAWYWTVERPDINALSDRRDLETVTRRINGGLTNLDDRRRRYNLALAVGDQLLTLIGDDDELADPTIQRFIREIHGALFNTVVTQSPYGDPQNPDGSEPRSNLWQLHELIKNGDGMGHARYVEESARAGDLRELERVVRAAKGLGRDRSPEFIARARNVLAQIEAANPEYLQAYIARNGALPAVPPPMRRKFSYAATLADTEFYDEAMTAVVAEMQSRYNTAGQLRDGLYIPGIINAETKYVMGYLSRPVIDTRPVLFTVCGTGVPWWVGPDADTARAVEDQYLWQPIGYPAAPFPMGRSITAGITEAHNQANRWRERIETHGTALAGYSQGAVVLSELWMNHIAPEDGSLRWMKPHVRKAVTWGNPNRELGHVWADHGGSPMAPSNTQGVSSNGMRNTPDWWRDYAHQGDLYACTEPGDTQEVRNAIWQIVRDLDLFTGPDSLLAQVIELAQAPLPETIAITRAILDAGMFFAKRTGPHVDYNPQPAIDYLRT

SEQ ID NO: 190 - protein, 831 aa, Artificial Sequence
  52+6+112+24
FKCRRWQWRMKKLGAMTLIVTRDHAQWVHDMCRARAGNRYGYGGAFTLNPRDTTDCSGLVLQTAAWYGGRKDWIGNRYGSTESFRLDHKIVYDLGFRRLPPGGVAALGFTPVMLVGLQHGGGGRYSHTACTLMTMDIPGGPVKVSQRGVDWESRGEVNGVGVFLYDGARAWNDPLFHDFWYLDAKLEDGPTQSVDAAEILARATGLAYNRAVALLPAVRDGLIQADCTNPNRIAMWLAQIGHESDDFKATAEYASGDAYDTRTDLGNTPEVDGDGRLYKGRSWIMITGKDNYRDFSRWAHGRGLVPTPDYFVVHPLELSELRWAGIGAAWYWTVERPDINALSDRRDLETVTRRINGGLTNLDDRRRRYNLALAVGDQLLTLIGDDDELADPTIQRFIREIHGALFNTVVTQSPYGDPQNPDGSEPRSNLWQLHELIKNGDGMGHARYVEESARAGDLRELERVVRAAKGLGRDRSPEFIARARNVLAQIEAANPEYLQAYIARNGALPAVPPPMVAAWTAVMRIRFASYALGVNGLPIKVDGYFGYDEEKVQKEYQRRTGQFPSGQVSREDLHRLGLLPTLISIHGTGQADPFGIGYPADIARRVLDLYWWQPLGNYPAKAVPMNGSVDQGEREGVRLISDPLIVPGPTAFVDYSQGSVIGGRLRNRMRRKELRGELVAAASFGNPMRLRGHYAGNVDPGGEGIDPRQELAAEPFRIELAAKGDLYTTCPGGQSGEMERAIYHAVFSKFIGEDTLIEQVWELAKNPFREVPAAVKAIVRGGMFAIRGTGPHVRYHIDQCPGTGMTYYEYAVKHLRDTADARLRRIVASVT

SEQ ID NO: 191 - protein, 658 aa, Artificial Sequence
  42+12+110+26
GLLSKVLGVGKKVLCGVSGLCMTTKDQVAQITIAEAKARGYTRSECLAIMSTFYQESGWNDTIWDPTHTTYGIAQQDGSYPHRFDGAAAQIKGFFDKLDVWRAKPGASTDIWLNICWMQQAPNWPSADYWYANGRRAYLTEIKSRIATVTPYLDKYWPADGGTAVPDEPRPDFNEFPIWSNNNSARSGKPTMFLIHTQEGGGGDAAAENLAKWFQNGNGVSYHYTISQASDGGVTVVDCVDTDRAAWSVGNANSISINLCFAGSRASWMRDQWMKQSNAIDVAAYLAVQDAKKYGFTPLVVPPPYTNGRPGISDHRWVTDVFKWGTHTDVGDWFPWDYFAERVNHWANGGKTEPEPPKVKRFPDDWSDREILVEILRQLRGYNLTGWPQLGGKTLVDAVAELLGHIPQGRSHPVQPYPGAFMWSGYPADLARRVEDLYYFQPIYYGPGGIPATVPMGASAQSGVDMGVRLVLECEARPSRDVPDGYALCGYSQGGMVVSALLDEFRTGRLRHLNGKLMAGSTFGNPWRELDSNGGRGISDRRIVGTPDFWVDEFDPGDIYANVPNNDVGDDMTAIFKLVQLRSLADLIGIGSIMDRVMDVLRGPLSGMRSVVEAIVRGLLFFGRKPPTAPHTEYHLREVRPGVTYFEHAVAHMRAMAA

SEQ ID NO: 192 - protein, 874 aa, Artificial Sequence
  40+2+110+24
FLGGLIKIVPAMICAVTKKCMTERVLPYDRNIVPQETGWWCGPAATQVVLNSRGIIVPEATLANEIEQIENPGRGDDRDGTDYVGLIEQVLDRRVPEAKYTSVYMPNDPPTAAQREALWQNIVRSINAGWGVIMNWVAPPSNKPRGVKGSPNPKYSGGTTYHYVACMGYDDTPGARALWIADSGFQPFNYWISFDQAATLIPPKGYAYAATTATAPAPAPAPVDAAPILARAAGISEAKAREILPTFRDGLRLAECNNVPRIAMFIAQTGHESDNFNATQEYDHGRNYGDPNEATDRWKYKGRTWIQITWRGNYERFSRWCFDRKLVPTPTYFVDNPRALADVRWAGIGAAWYWTVERPSINRLCDERNLTEVTRLINGGTSWEAPTWMKHRKERYDRALAVGNDLLKLLDGEEEGFLSALTPKEQRELYDEIMKRGPSRSFLADDGRQIETLLGFIYNIDGNAWNIVNILGCLIGVPECVDDIRDVAENGVRKGSYAESNPWLAQFGQEFCKRLLPLAGKLSELLNAQEFKVTHNRIIEQIPQGRSHPVQPYPGAFMVAAWTAVMRIRFASYALGVNGLPIKVDGYFGYDEEKVQKEYQRRTGQFPSGQVSREDLHRLGLLPTLISIHGTGQADPFGIGYPADIARRVLDLYWWQPLGNYPAKAVPMNGSVDQGEREGVRLISDPLIVPGPTAFVDYSQGSVIGGRLRNRMRRKELRGELVAAASFGNPMRLRGHYAGNVDPGGEGIDPRQELAAEPFRIELAAKGDLYTTCPGGQSGEMERAIYHAVFSKFIGEDTLIEQVWELAKNPFREVPAAVKAIVRGGMFAIRGTGPHVRYHIDQCPGTGMTYYEYAVKHLRDTADARLRRIVASVT

SEQ ID NO: 193 - protein, 845 aa, Artificial Sequence
  60+2+104+18
LLGDFFRKSKEKIGKEFKRIVQRIKDFLRNLVPRTESMTERVLPYDRNIVPQETGWWCGPAATQVVLNSRGIIVPEATLANEIEQIENPGRGDDRDGTDYVGLIEQVLDRRVPEAKYTSVYMPNDPPTAAQREALWQNIVRSINAGWGVIMNWVAPPSNKPRGVKGSPNPKYSGGTTYHYVACMGYDDTPGARALWIADSGFQPFNYWISFDQAATLIPPKGYAYAATTATAPAPAPAPVDAAPILARAAGISEAKAREILPTFRDGLRLAECNNVPRIAMFIAQTGHESDNFNATQEYDHGRNYGDPNEATDRWKYKGRTWIQITWRGNYERFSRWCFDRKLVPTPTYFVDNPRALADVRWAGIGAAWYWTVERPSINRLCDERNLTEVTRLINGGTSWEAPTWMKHRKERYDRALAVGNDLLKLLDGEEEGFLSALTPKEQRELYDEIMKRGPSRSFLADDGRQIETLLGFIYNIDGNAWNIVNILGCLIGVPECVDDIRDVAENGVRKGSYAESNPWLAQFGQEFCKRLLPLAGKLSELLNAQEFKVTHNRIIEQAGAGAGMLNGEFYVPAGTIITANGTGVPDGAGPGFGADLARELERVAEGMWIWKWINYPAAVMPMRPSINTLRLALKEMIRTTPGKIVLSAYSQSAVAFAYVWRDDILNPDGELHDRLDDIVAVILYGNPVRAPGIAYGNELGGQSAPGKLNGHVTGGIAGPDCLRPEECVHPVTGRRIVLDFANAGDLYAAAPVGAEPWVKETEVGHNETLIYEAVMDFNGRDILAFAKEIAQILTMPLSQVVPLVQAIINGLSFLVQGPKAPHWTYTIGPAVDYLVRTGNELRKN

SEQ ID NO: 194 - protein, 754 aa, Artificial Sequence
  38+4+110+26
WRSLGRTLLRLSHALKPLARRSGWMPRVVYGLTHSSNGWPMLNSDECEWTKIPGTSVTLQIAKGQPLAILRAFAADFHAYVEPLRDADSACWTPTNSVPSSNHLSGTAMDLNWNTHPFQVPDAGFDAAKKARVKELLDFYEGMVFWGNDWSSPKDAMHFQLASLRNGGTFDTYGNPKTADFIARKIRADGYSTFRRGSAPASAAPILAAATGLSEARAAEILPAVRSGLRESECTNVNRIAMWLAQIGHESGSFQYTEEIAKNGRYAPYIGRTWIQITWDYNYRSFSQWAYAFGMVPTPDYFVVNYRELADLKWAGIGPAWYWTVARPDINELSDRRDLNTVTRRINGGTNGLADRQARYNRALAQGDALLQLLHEEDDFLSALTDAEQRELLDLARQQAKYKRKSRSPLHWPHEGEVDTIAGLSWSTDANVHIQLVEKLAVIYGDPVSIALLYAVSNSDDPTNNPELAKRILKRVKPEDITAAQVQIQKWLAAEQKFHAAIPQGRSHPVQPYPGAFMWSGYPADLARRVEDLYYFQPIYYGPGGIPATVPMGASAQSGVDMGVRLVLECEARPSRDVPDGYALCGYSQGGMVVSALLDEFRTGRLRHLNGKLMAGSTFGNPWRELDSNGGRGISDRRIVGTPDFWVDEFDPGDIYANVPNNDVGDDMTAIFKLVQLRSLADLIGIGSIMDRVMDVLRGPLSGMRSVVEAIVRGLLFFGRKPPTAPHTEYHLREVRPGVTYFEHAVAHMRAMAA

SEQ ID NO: 195 - protein, 728 aa, Artificial Sequence
  62+10+104+32
ILPWKWPWWPWRRMPVYAIQSGTVIYAGAASGYGGPDPAGWLVIDSDDAEGGGCLEYGHIVREVNRGDHVTAGQRIGHINPNNRTNGGVAPHLHVTDWPHAYGQGSRQNVMARLSGAREPEAQAAPTPTEQGTVVGDPVWLADVVRPTVAKFAEYPGWRNRGHGDFKDIRGVMVHHTGGPASAASIANGRPDLAGPLAQLHISRDGTVTVVAVGVAWHAGAGSYPWLPTNMGNWHLIGIECEWPYGEPGINERNAYTVRWRDPEIIALRNTCAAILLRLGLGVDRLIGHKDYAGRAQGKWDPGNMSMDWLRGEVRKDMDGFVFPGEDIVNVTPPPVPAPVPAPPATANVLLHRGMSGPNVVKLQTTLRRWYSKLAVDGDFGPHTEACVRDRQRIYGLDVDGIVGPLTAAKIGLVLAGAGAGMRRKFSYAATLADTEFYDEAMTAVVAEMQSRYNTAGQLRDGLYIPGIINAETKYVMGYLSRPVIDTRPVLFTVCGTGVPWWVGPDADTARAVEDQYLWQPIGYPAAPFPMGRSITAGITEAHNQANRWRERIETHGTALAGYSQGAVVLSELWMNHIAPEDGSLRWMKPHVRKAVTWGNPNRELGHVWADHGGSPMAPSNTQGVSSNGMRNTPDWWRDYAHQGDLYACTEPGDTQEVRNAIWQIVRDLDLFTGPDSLLAQVIELAQAPLPETIAITRAILDAGMFFAKRTGPHVDYNPQPAIDYLRT

SEQ ID NO: 196 - protein, 857 aa, Artificial Sequence
  40+14+106+18
FLGGLIKIVPAMICAVTKKCMSFTRFLQDDPLLTREQVMAELIRVADELNMPDKRGACVIAGMTISQEVGVKDNDPPFERRFWCPANRADPESFNYPHDSESNDGRSVGYFQQQKGPNGELWWGTTASEMNLHSAATQFMTRLKAAGYNASNAQAANDSAQAIQRSGVPQAYKQWWDDINRLYDKVKGSGGGPAPAPKPPQSGPWTGDPVWLADVLRAEGLNVVELPGWLDRGHGDMGRLWGVVCHHTGSDNTPSSEIAFHPSLGLCSQIHLARNGTVTLCGVGIAWHAGVGSYPGLPEDNANAVTIGIEAQNSGTYDGAPHRTNWPDAQYDAYVKCCAAICRRLGVRADHVISHKEWAGRKQGKWDPGAIDMNIFRADVQRRIDAHQPNGEDDFMAALSADEQREVLNLLRVLADRRFVSRSPFRHLGEGPSETVAGFGLNTDGLNHAQYTIELARLGDPTHLALLREVASAEGDSRYPDRQYDAKLAKRVLAEIEGAATAPAKPSTPSAPTEPAPEAPTPPVKAACALSAAGCVVAGSTSGGGCALSTDGTGKCVVTAATDGGAALSRFFHAELMLNGEFYVPAGTIITANGTGVPDGAGPGFGADLARELERVAEGMWIWKWINYPAAVMPMRPSINTLRLALKEMIRTTPGKIVLSAYSQSAVAFAYVWRDDILNPDGELHDRLDDIVAVILYGNPVRAPGIAYGNELGGQSAPGKLNGHVTGGIAGPDCLRPEECVHPVTGRRIVLDFANAGDLYAAAPVGAEPWVKETEVGHNETLIYEAVMDFNGRDILAFAKEIAQILTMPLSQVVPLVQAIINGLSFLVQGPKAPHWTYTIGPAVDYLVRTGNELRKN

SEQ ID NO: 197 - protein, 831 aa, Artificial Sequence
  62+8+110+24
ILPWKWPWWPWRRMLTVESFAAAMGNSLSVDRYRQLFPAAVESMVACGCTTVNRAAMWLAQVGHESGGLRWMEELASGAAYEWRSDLGNTQAGDGVRFKGRGPIQITGRYNYRKVSEWAHAQGIVPTPTYFVDNPTQLASDQYGFIGVSWYWQHGGPRPGQINGFADAGDILSGSRCVNGWVTTPNGMPDRTERWNRCRAMGDQILPAGAGTDNGGDGMAWTGDPVWLEDVLRPVLGDRLRVLPSWQMYGHGDFKDIRGVMVHHTGNARETAESIRKGRPDLRGPLSNIHIAPDGTVTLVAAGVCWHAGAGSYPWLPTNNANWHMIGIECAWPTIRPNGTYDEREPWPDAQIIAMRDTCAALTKRLGWDASRVIGHKEYAGASQGKWDPGNLDMGWFRGEVAKAMRGEFDPKAPAPAPNPPADNDNGGFLMALNDKQQHDLYNAVMTIAAVAADIQTQLRGPGLRGWPQLGRNANGEALTLVDAVGVIKAIADREAGRIPQGRSHPVQPYPGAFMVAAWTAVMRIRFASYALGVNGLPIKVDGYFGYDEEKVQKEYQRRTGQFPSGQVSREDLHRLGLLPTLISIHGTGQADPFGIGYPADIARRVLDLYWWQPLGNYPAKAVPMNGSVDQGEREGVRLISDPLIVPGPTAFVDYSQGSVIGGRLRNRMRRKELRGELVAAASFGNPMRLRGHYAGNVDPGGEGIDPRQELAAEPFRIELAAKGDLYTTCPGGQSGEMERAIYHAVFSKFIGEDTLIEQVWELAKNPFREVPAAVKAIVRGGMFAIRGTGPHVRYHIDQCPGTGMTYYEYAVKHLRDTADARLRRIVASVT

SEQ ID NO: 198 - protein, 843 aa, Artificial Sequence
  88+8+108+28
GWRTLLKKAEVKTVGKLALKHYLMLTVESFAAAMGNSLSVDRYRQLFPAAVESMVACGCTTVNRAAMWLAQVGHESGGLRWMEELASGAAYEWRSDLGNTQAGDGVRFKGRGPIQITGRYNYRKVSEWAHAQGIVPTPTYFVDNPTQLASDQYGFIGVSWYWQHGGPRPGQINGFADAGDILSGSRCVNGWVTTPNGMPDRTERWNRCRAMGDQILPAGAGTDNGGDGMAWTGDPVWLEDVLRPVLGDRLRVLPSWQMYGHGDFKDIRGVMVHHTGNARETAESIRKGRPDLRGPLSNIHIAPDGTVTLVAAGVCWHAGAGSYPWLPTNNANWHMIGIECAWPTIRPNGTYDEREPWPDAQIIAMRDTCAALTKRLGWDASRVIGHKEYAGASQGKWDPGNLDMGWFRGEVAKAMRGEFDPKAPAPAPNPPADNDNGGFLMALNDKQQHDLYNAVMTIAAVAADIQTQLRGPGLRGWPQLGRNANGEALTLVDAVGVIKAIADREAGRVFNQRKEHKGYMLAMPLRVGSNDANTGGLVSRWQKTMLARYAAYAKAYDGGPLRVDGYFGYDDADVQREYERRTHQVVDGEVSDADLRALGLEAAKRWLFTVHGTGQADPLGPGLPADTARAVLDKYTWQPIGNYPARAFPMWSSIMDGARELRSQIASKSGEVNLAGYSQGAVVVGQVLKHDIMDPKGSLHHRLGDVRKVVLWGNPMRQRGIAHFDEWIHPVAGPDSYGILDDRLEGLEKAPFEIRDYAHAGDMYASITDGDKDEYKIAICKIVMTATDFYRGPNSVVSQLIELGQRPLTEGIAMALAIIDTLRFFTNTAHGYNIGPAIDFLRS

SEQ ID NO: 199 - protein, 813 aa, Artificial Sequence
  36+18+106+6
KFFRKLKKSVKKRAKEFFKKPRVIGVSIPFMLNGEFYVPAGTIITANGTGVPDGAGPGFGADLARELERVAEGMWIWKWINYPAAVMPMRPSINTLRLALKEMIRTTPGKIVLSAYSQSAVAFAYVWRDDILNPDGELHDRLDDIVAVILYGNPVRAPGIAYGNELGGQSAPGKLNGHVTGGIAGPDCLRPEECVHPVTGRRIVLDFANAGDLYAAAPVGAEPWVKETEVGHNETLIYEAVMDFNGRDILAFAKEIAQILTMPLSQVVPLVQAIINGLSFLVQGPKAPHWTYTIGPAVDYLVRTGNELRKNLSRFFHAELMTLIVTRDHAQWVHDMCRARAGNRYGYGGAFTLNPRDTTDCSGLVLQTAAWYGGRKDWIGNRYGSTESFRLDHKIVYDLGFRRLPPGGVAALGFTPVMLVGLQHGGGGRYSHTACTLMTMDIPGGPVKVSQRGVDWESRGEVNGVGVFLYDGARAWNDPLFHDFWYLDAKLEDGPTQSVDAAEILARATGLAYNRAVALLPAVRDGLIQADCTNPNRIAMWLAQIGHESDDFKATAEYASGDAYDTRTDLGNTPEVDGDGRLYKGRSWIMITGKDNYRDFSRWAHGRGLVPTPDYFVVHPLELSELRWAGIGAAWYWTVERPDINALSDRRDLETVTRRINGGLTNLDDRRRRYNLALAVGDQLLTLIGDDDELADPTIQRFIREIHGALFNTVVTQSPYGDPQNPDGSEPRSNLWQLHELIKNGDGMGHARYVEESARAGDLRELERVVRAAKGLGRDRSPEFIARARNVLAQIEAANPEYLQAYIARNGAL

SEQ ID NO: 200 - protein, 889 aa, Artificial Sequence
  92+20+106+14
SSLLEKGLDGAKKAVGGLGKLGKDAMRRKFASYAGDLADTPLYDEAMTAAVAEMQARYSAAGQLRAGLYIPGIVGAETKYVMGYLPRPVVDTRPVLITVCGTGVPWWIGPDADTARAVEDKYLWQPIGYPAAPFPMGKSIAAAITETHNQANRWRERIETHGAALAGYSQGAVVVSELWMNHIAPEDGSLHWMKPHIEKAVTWGNPNRELGHVWADHGGSPRAPSNTQGVSSNGMRDTPPWWRDYAHQGDLYACTEPGDTQEVRNAIWQIVRDLDLFTGPDSLLAQVVELVQAPLPEAIAITKALLDAGMFFAKRTGPHVDYNVQPAIDYLRTLSRFFHAELMSFTRFLQDDPLLTREQVMAELIRVADELNMPDKRGACVIAGMTISQEVGVKDNDPPFERRFWCPANRADPESFNYPHDSESNDGRSVGYFQQQKGPNGELWWGTTASEMNLHSAATQFMTRLKAAGYNASNAQAANDSAQAIQRSGVPQAYKQWWDDINRLYDKVKGSGGGPAPAPKPPQSGPWTGDPVWLADVLRAEGLNVVELPGWLDRGHGDMGRLWGVVCHHTGSDNTPSSEIAFHPSLGLCSQIHLARNGTVTLCGVGIAWHAGVGSYPGLPEDNANAVTIGIEAQNSGTYDGAPHRTNWPDAQYDAYVKCCAAICRRLGVRADHVISHKEWAGRKQGKWDPGAIDMNIFRADVQRRIDAHQPNGEDDFMAALSADEQREVLNLLRVLADRRFVSRSPFRHLGEGPSETVAGFGLNTDGLNHAQYTIELARLGDPTHLALLREVASAEGDSRYPDRQYDAKLAKRVLAEIEGAATAPAKPSTPSAPTEPAPEAPTPPVKAACALSAAGCVVAGSTSGGGCALSTDGTGKCVVTAATDGGAA

SEQ ID NO: 201 - protein, 871 aa, Artificial Sequence
  40+28+106+2
FLGGLIKIVPAMICAVTKKCMPLRVGSNDANTGGLVSRWQKTMLARYAAYAKAYDGGPLRVDGYFGYDDADVQREYERRTHQVVDGEVSDADLRALGLEAAKRWLFTVHGTGQADPLGPGLPADTARAVLDKYTWQPIGNYPARAFPMWSSIMDGARELRSQIASKSGEVNLAGYSQGAVVVGQVLKHDIMDPKGSLHHRLGDVRKVVLWGNPMRQRGIAHFDEWIHPVAGPDSYGILDDRLEGLEKAPFEIRDYAHAGDMYASITDGDKDEYKIAICKIVMTATDFYRGPNSVVSQLIELGQRPLTEGIAMALAIIDTLRFFTNTAHGYNIGPAIDFLRSLSRFFHAELMTERVLPYDRNIVPQETGWWCGPAATQVVLNSRGIIVPEATLANEIEQIENPGRGDDRDGTDYVGLIEQVLDRRVPEAKYTSVYMPNDPPTAAQREALWQNIVRSINAGWGVIMNWVAPPSNKPRGVKGSPNPKYSGGTTYHYVACMGYDDTPGARALWIADSGFQPFNYWISFDQAATLIPPKGYAYAATTATAPAPAPAPVDAAPILARAAGISEAKAREILPTFRDGLRLAECNNVPRIAMFIAQTGHESDNFNATQEYDHGRNYGDPNEATDRWKYKGRTWIQITWRGNYERFSRWCFDRKLVPTPTYFVDNPRALADVRWAGIGAAWYWTVERPSINRLCDERNLTEVTRLINGGTSWEAPTWMKHRKERYDRALAVGNDLLKLLDGEEEGFLSALTPKEQRELYDEIMKRGPSRSFLADDGRQIETLLGFIYNIDGNAWNIVNILGCLIGVPECVDDIRDVAENGVRKGSYAESNPWLAQFGQEFCKRLLPLAGKLSELLNAQEFKVTHNRIIEQ

SEQ ID NO: 202 - protein, 754 aa, Artificial Sequence
  36+20+108+10
KFFRKLKKSVKKRAKEFFKKPRVIGVSIPFMRRKFASYAGDLADTPLYDEAMTAAVAEMQARYSAAGQLRAGLYIPGIVGAETKYVMGYLPRPVVDTRPVLITVCGTGVPWWIGPDADTARAVEDKYLWQPIGYPAAPFPMGKSIAAAITETHNQANRWRERIETHGAALAGYSQGAVVVSELWMNHIAPEDGSLHWMKPHIEKAVTWGNPNRELGHVWADHGGSPRAPSNTQGVSSNGMRDTPPWWRDYAHQGDLYACTEPGDTQEVRNAIWQIVRDLDLFTGPDSLLAQVVELVQAPLPEAIAITKALLDAGMFFAKRTGPHVDYNVQPAIDYLRTVFNQRKEHKGYMLAMPVYAIQSGTVIYAGAASGYGGPDPAGWLVIDSDDAEGGGCLEYGHIVREVNRGDHVTAGQRIGHINPNNRTNGGVAPHLHVTDWPHAYGQGSRQNVMARLSGAREPEAQAAPTPTEQGTVVGDPVWLADVVRPTVAKFAEYPGWRNRGHGDFKDIRGVMVHHTGGPASAASIANGRPDLAGPLAQLHISRDGTVTVVAVGVAWHAGAGSYPWLPTNMGNWHLIGIECEWPYGEPGINERNAYTVRWRDPEIIALRNTCAAILLRLGLGVDRLIGHKDYAGRAQGKWDPGNMSMDWLRGEVRKDMDGFVFPGEDIVNVTPPPVPAPVPAPPATANVLLHRGMSGPNVVKLQTTLRRWYSKLAVDGDFGPHTEACVRDRQRIYGLDVDGIVGPLTAAKIGLVL

SEQ ID NO: 203 - protein, 677 aa, Artificial Sequence
  36+16+106+12
KFFRKLKKSVKKRAKEFFKKPRVIGVSIPFMSKPWLFTVHGTGQPDPLGPGLPADTARDVLDIYRWQPIGNYPAAAFPMWPSVEKGVAELILQIELKLDADPYADFAMAGYSQGAIVVGQVLKHHILPPTGRLHRFLHRLKKVIFWGNPMRQKGFAHSDEWIHPVAAPDTLGILEDRLENLEQYGFEVRDYAHDGDMYASIKEDDLHEYEVAIGRIVMKASGFIGGRDSVVAQLIELGQRPITEGIALAGAIIDALTFFARSRMGDKWPHLYNRYPAVEFLRQILSRFFHAELMTTKDQVAQITIAEAKARGYTRSECLAIMSTFYQESGWNDTIWDPTHTTYGIAQQDGSYPHRFDGAAAQIKGFFDKLDVWRAKPGASTDIWLNICWMQQAPNWPSADYWYANGRRAYLTEIKSRIATVTPYLDKYWPADGGTAVPDEPRPDFNEFPIWSNNNSARSGKPTMFLIHTQEGGGGDAAAENLAKWFQNGNGVSYHYTISQASDGGVTVVDCVDTDRAAWSVGNANSISINLCFAGSRASWMRDQWMKQSNAIDVAAYLAVQDAKKYGFTPLVVPPPYTNGRPGISDHRWVTDVFKWGTHTDVGDWFPWDYFAERVNHWANGGKTEPEPPKVKRFPDDWSDREILVEILRQLRGYNLTGWPQLGGKTLVDAVAELLGH

SEQ ID NO: 204 - protein, 710 aa, Artificial Sequence
  42+18+112+10
GLLSKVLGVGKKVLCGVSGLCMLNGEFYVPAGTIITANGTGVPDGAGPGFGADLARELERVAEGMWIWKWINYPAAVMPMRPSINTLRLALKEMIRTTPGKIVLSAYSQSAVAFAYVWRDDILNPDGELHDRLDDIVAVILYGNPVRAPGIAYGNELGGQSAPGKLNGHVTGGIAGPDCLRPEECVHPVTGRRIVLDFANAGDLYAAAPVGAEPWVKETEVGHNETLIYEAVMDFNGRDILAFAKEIAQILTMPLSQVVPLVQAIINGLSFLVQGPKAPHWTYTIGPAVDYLVRTGNELRKNPAVPPPMPVYAIQSGTVIYAGAASGYGGPDPAGWLVIDSDDAEGGGCLEYGHIVREVNRGDHVTAGQRIGHINPNNRTNGGVAPHLHVTDWPHAYGQGSRQNVMARLSGAREPEAQAAPTPTEQGTVVGDPVWLADVVRPTVAKFAEYPGWRNRGHGDFKDIRGVMVHHTGGPASAASIANGRPDLAGPLAQLHISRDGTVTVVAVGVAWHAGAGSYPWLPTNMGNWHLIGIECEWPYGEPGINERNAYTVRWRDPEIIALRNTCAAILLRLGLGVDRLIGHKDYAGRAQGKWDPGNMSMDWLRGEVRKDMDGFVFPGEDIVNVTPPPVPAPVPAPPATANVLLHRGMSGPNVVKLQTTLRRWYSKLAVDGDFGPHTEACVRDRQRIYGLDVDGIVGPLTAAKIGLVL

SEQ ID NO: 205 - protein, 810 aa, Artificial Sequence
  50+16+112+2
RGLRRLGRKIAHGVKKYGPTVLRIIRIAGMSKPWLFTVHGTGQPDPLGPGLPADTARDVLDIYRWQPIGNYPAAAFPMWPSVEKGVAELILQIELKLDADPYADFAMAGYSQGAIVVGQVLKHHILPPTGRLHRFLHRLKKVIFWGNPMRQKGFAHSDEWIHPVAAPDTLGILEDRLENLEQYGFEVRDYAHDGDMYASIKEDDLHEYEVAIGRIVMKASGFIGGRDSVVAQLIELGQRPITEGIALAGAIIDALTFFARSRMGDKWPHLYNRYPAVEFLRQIPAVPPPMTERVLPYDRNIVPQETGWWCGPAATQVVLNSRGIIVPEATLANEIEQIENPGRGDDRDGTDYVGLIEQVLDRRVPEAKYTSVYMPNDPPTAAQREALWQNIVRSINAGWGVIMNWVAPPSNKPRGVKGSPNPKYSGGTTYHYVACMGYDDTPGARALWIADSGFQPFNYWISFDQAATLIPPKGYAYAATTATAPAPAPAPVDAAPILARAAGISEAKAREILPTFRDGLRLAECNNVPRIAMFIAQTGHESDNFNATQEYDHGRNYGDPNEATDRWKYKGRTWIQITWRGNYERFSRWCFDRKLVPTPTYFVDNPRALADVRWAGIGAAWYWTVERPSINRLCDERNLTEVTRLINGGTSWEAPTWMKHRKERYDRALAVGNDLLKLLDGEEEGFLSALTPKEQRELYDEIMKRGPSRSFLADDGRQIETLLGFIYNIDGNAWNIVNILGCLIGVPECVDDIRDVAENGVRKGSYAESNPWLAQFGQEFCKRLLPLAGKLSELLNAQEFKVTHNRIIEQ

SEQ ID NO: 206 - protein, 794 aa, Artificial Sequence
  36+26+112+2
KFFRKLKKSVKKRAKEFFKKPRVIGVSIPFMWSGYPADLARRVEDLYYFQPIYYGPGGIPATVPMGASAQSGVDMGVRLVLECEARPSRDVPDGYALCGYSQGGMVVSALLDEFRTGRLRHLNGKLMAGSTFGNPWRELDSNGGRGISDRRIVGTPDFWVDEFDPGDIYANVPNNDVGDDMTAIFKLVQLRSLADLIGIGSIMDRVMDVLRGPLSGMRSVVEAIVRGLLFFGRKPPTAPHTEYHLREVRPGVTYFEHAVAHMRAMAAPAVPPPMTERVLPYDRNIVPQETGWWCGPAATQVVLNSRGIIVPEATLANEIEQIENPGRGDDRDGTDYVGLIEQVLDRRVPEAKYTSVYMPNDPPTAAQREALWQNIVRSINAGWGVIMNWVAPPSNKPRGVKGSPNPKYSGGTTYHYVACMGYDDTPGARALWIADSGFQPFNYWISFDQAATLIPPKGYAYAATTATAPAPAPAPVDAAPILARAAGISEAKAREILPTFRDGLRLAECNNVPRIAMFIAQTGHESDNFNATQEYDHGRNYGDPNEATDRWKYKGRTWIQITWRGNYERFSRWCFDRKLVPTPTYFVDNPRALADVRWAGIGAAWYWTVERPSINRLCDERNLTEVTRLINGGTSWEAPTWMKHRKERYDRALAVGNDLLKLLDGEEEGFLSALTPKEQRELYDEIMKRGPSRSFLADDGRQIETLLGFIYNIDGNAWNIVNILGCLIGVPECVDDIRDVAENGVRKGSYAESNPWLAQFGQEFCKRLLPLAGKLSELLNAQEFKVTHNRIIEQ

SEQ ID NO: 207 - protein, 825 aa, Artificial Sequence
  48+16+112+14
RGGRLCYCRRRFCVCVGRMSKPWLFTVHGTGQPDPLGPGLPADTARDVLDIYRWQPIGNYPAAAFPMWPSVEKGVAELILQIELKLDADPYADFAMAGYSQGAIVVGQVLKHHILPPTGRLHRFLHRLKKVIFWGNPMRQKGFAHSDEWIHPVAAPDTLGILEDRLENLEQYGFEVRDYAHDGDMYASIKEDDLHEYEVAIGRIVMKASGFIGGRDSVVAQLIELGQRPITEGIALAGAIIDALTFFARSRMGDKWPHLYNRYPAVEFLRQIPAVPPPMSFTRFLQDDPLLTREQVMAELIRVADELNMPDKRGACVIAGMTISQEVGVKDNDPPFERRFWCPANRADPESFNYPHDSESNDGRSVGYFQQQKGPNGELWWGTTASEMNLHSAATQFMTRLKAAGYNASNAQAANDSAQAIQRSGVPQAYKQWWDDINRLYDKVKGSGGGPAPAPKPPQSGPWTGDPVWLADVLRAEGLNVVELPGWLDRGHGDMGRLWGVVCHHTGSDNTPSSEIAFHPSLGLCSQIHLARNGTVTLCGVGIAWHAGVGSYPGLPEDNANAVTIGIEAQNSGTYDGAPHRTNWPDAQYDAYVKCCAAICRRLGVRADHVISHKEWAGRKQGKWDPGAIDMNIFRADVQRRIDAHQPNGEDDFMAALSADEQREVLNLLRVLADRRFVSRSPFRHLGEGPSETVAGFGLNTDGLNHAQYTIELARLGDPTHLALLREVASAEGDSRYPDRQYDAKLAKRVLAEIEGAATAPAKPSTPSAPTEPAPEAPTPPVKAACALSAAGCVVAGSTSGGGCALSTDGTGKCVVTAATDGGAA

SEQ ID NO: 208 - protein, 759 aa, Artificial Sequence
  66+20+114+10
GGLKKLGKKLEGAGKRVFNAAEKALPVVAGAKALRKMRRKFASYAGDLADTPLYDEAMTAAVAEMQARYSAAGQLRAGLYIPGIVGAETKYVMGYLPRPVVDTRPVLITVCGTGVPWWIGPDADTARAVEDKYLWQPIGYPAAPFPMGKSIAAAITETHNQANRWRERIETHGAALAGYSQGAVVVSELWMNHIAPEDGSLHWMKPHIEKAVTWGNPNRELGHVWADHGGSPRAPSNTQGVSSNGMRDTPPWWRDYAHQGDLYACTEPGDTQEVRNAIWQIVRDLDLFTGPDSLLAQVVELVQAPLPEAIAITKALLDAGMFFAKRTGPHVDYNVQPAIDYLRTEAAAKEAAKEAAKMPVYAIQSGTVIYAGAASGYGGPDPAGWLVIDSDDAEGGGCLEYGHIVREVNRGDHVTAGQRIGHINPNNRTNGGVAPHLHVTDWPHAYGQGSRQNVMARLSGAREPEAQAAPTPTEQGTVVGDPVWLADVVRPTVAKFAEYPGWRNRGHGDFKDIRGVMVHHTGGPASAASIANGRPDLAGPLAQLHISRDGTVTVVAVGVAWHAGAGSYPWLPTNMGNWHLIGIECEWPYGEPGINERNAYTVRWRDPEIIALRNTCAAILLRLGLGVDRLIGHKDYAGRAQGKWDPGNMSMDWLRGEVRKDMDGFVFPGEDIVNVTPPPVPAPVPAPPATANVLLHRGMSGPNVVKLQTTLRRWYSKLAVDGDFGPHTEACVRDRQRIYGLDVDGIVGPLTAAKIGLVL

SEQ ID NO: 209 - protein, 683 aa, Artificial Sequence
  102+16+108+10
ILGKIWKGIKSLFMSKPWLFTVHGTGQPDPLGPGLPADTARDVLDIYRWQPIGNYPAAAFPMWPSVEKGVAELILQIELKLDADPYADFAMAGYSQGAIVVGQVLKHHILPPTGRLHRFLHRLKKVIFWGNPMRQKGFAHSDEWIHPVAAPDTLGILEDRLENLEQYGFEVRDYAHDGDMYASIKEDDLHEYEVAIGRIVMKASGFIGGRDSVVAQLIELGQRPITEGIALAGAIIDALTFFARSRMGDKWPHLYNRYPAVEFLRQIVFNQRKEHKGYMLAMPVYAIQSGTVIYAGAASGYGGPDPAGWLVIDSDDAEGGGCLEYGHIVREVNRGDHVTAGQRIGHINPNNRTNGGVAPHLHVTDWPHAYGQGSRQNVMARLSGAREPEAQAAPTPTEQGTVVGDPVWLADVVRPTVAKFAEYPGWRNRGHGDFKDIRGVMVHHTGGPASAASIANGRPDLAGPLAQLHISRDGTVTVVAVGVAWHAGAGSYPWLPTNMGNWHLIGIECEWPYGEPGINERNAYTVRWRDPEIIALRNTCAAILLRLGLGVDRLIGHKDYAGRAQGKWDPGNMSMDWLRGEVRKDMDGFVFPGEDIVNVTPPPVPAPVPAPPATANVLLHRGMSGPNVVKLQTTLRRWYSKLAVDGDFGPHTEACVRDRQRIYGLDVDGIVGPLTAAKIGLVL

SEQ ID NO: 210 - protein, 680 aa, Artificial Sequence
  100+18+112+12
KRKKRKKRKMLNGEFYVPAGTIITANGTGVPDGAGPGFGADLARELERVAEGMWIWKWINYPAAVMPMRPSINTLRLALKEMIRTTPGKIVLSAYSQSAVAFAYVWRDDILNPDGELHDRLDDIVAVILYGNPVRAPGIAYGNELGGQSAPGKLNGHVTGGIAGPDCLRPEECVHPVTGRRIVLDFANAGDLYAAAPVGAEPWVKETEVGHNETLIYEAVMDFNGRDILAFAKEIAQILTMPLSQVVPLVQAIINGLSFLVQGPKAPHWTYTIGPAVDYLVRTGNELRKNPAVPPPMTTKDQVAQITIAEAKARGYTRSECLAIMSTFYQESGWNDTIWDPTHTTYGIAQQDGSYPHRFDGAAAQIKGFFDKLDVWRAKPGASTDIWLNICWMQQAPNWPSADYWYANGRRAYLTEIKSRIATVTPYLDKYWPADGGTAVPDEPRPDFNEFPIWSNNNSARSGKPTMFLIHTQEGGGGDAAAENLAKWFQNGNGVSYHYTISQASDGGVTVVDCVDTDRAAWSVGNANSISINLCFAGSRASWMRDQWMKQSNAIDVAAYLAVQDAKKYGFTPLVVPPPYTNGRPGISDHRWVTDVFKWGTHTDVGDWFPWDYFAERVNHWANGGKTEPEPPKVKRFPDDWSDREILVEILRQLRGYNLTGWPQLGGKTLVDAVAELLGH

SEQ ID NO: 211 - protein, 902 aa, Artificial Sequence
  92+28+106+14
SSLLEKGLDGAKKAVGGLGKLGKDAMPLRVGSNDANTGGLVSRWQKTMLARYAAYAKAYDGGPLRVDGYFGYDDADVQREYERRTHQVVDGEVSDADLRALGLEAAKRWLFTVHGTGQADPLGPGLPADTARAVLDKYTWQPIGNYPARAFPMWSSIMDGARELRSQIASKSGEVNLAGYSQGAVVVGQVLKHDIMDPKGSLHHRLGDVRKVVLWGNPMRQRGIAHFDEWIHPVAGPDSYGILDDRLEGLEKAPFEIRDYAHAGDMYASITDGDKDEYKIAICKIVMTATDFYRGPNSVVSQLIELGQRPLTEGIAMALAIIDTLRFFTNTAHGYNIGPAIDFLRSLSRFFHAELMSFTRFLQDDPLLTREQVMAELIRVADELNMPDKRGACVIAGMTISQEVGVKDNDPPFERRFWCPANRADPESFNYPHDSESNDGRSVGYFQQQKGPNGELWWGTTASEMNLHSAATQFMTRLKAAGYNASNAQAANDSAQAIQRSGVPQAYKQWWDDINRLYDKVKGSGGGPAPAPKPPQSGPWTGDPVWLADVLRAEGLNVVELPGWLDRGHGDMGRLWGVVCHHTGSDNTPSSEIAFHPSLGLCSQIHLARNGTVTLCGVGIAWHAGVGSYPGLPEDNANAVTIGIEAQNSGTYDGAPHRTNWPDAQYDAYVKCCAAICRRLGVRADHVISHKEWAGRKQGKWDPGAIDMNIFRADVQRRIDAHQPNGEDDFMAALSADEQREVLNLLRVLADRRFVSRSPFRHLGEGPSETVAGFGLNTDGLNHAQYTIELARLGDPTHLALLREVASAEGDSRYPDRQYDAKLAKRVLAEIEGAATAPAKPSTPSAPTEPAPEAPTPPVKAACALSAAGCVVAGSTSGGGCALSTDGTGKCVVTAATDGGAA

SEQ ID NO: 212 - protein, 874 aa, Artificial Sequence
  36+18+110+14
KFFRKLKKSVKKRAKEFFKKPRVIGVSIPFMLNGEFYVPAGTIITANGTGVPDGAGPGFGADLARELERVAEGMWIWKWINYPAAVMPMRPSINTLRLALKEMIRTTPGKIVLSAYSQSAVAFAYVWRDDILNPDGELHDRLDDIVAVILYGNPVRAPGIAYGNELGGQSAPGKLNGHVTGGIAGPDCLRPEECVHPVTGRRIVLDFANAGDLYAAAPVGAEPWVKETEVGHNETLIYEAVMDFNGRDILAFAKEIAQILTMPLSQVVPLVQAIINGLSFLVQGPKAPHWTYTIGPAVDYLVRTGNELRKNIPQGRSHPVQPYPGAFMSFTRFLQDDPLLTREQVMAELIRVADELNMPDKRGACVIAGMTISQEVGVKDNDPPFERRFWCPANRADPESFNYPHDSESNDGRSVGYFQQQKGPNGELWWGTTASEMNLHSAATQFMTRLKAAGYNASNAQAANDSAQAIQRSGVPQAYKQWWDDINRLYDKVKGSGGGPAPAPKPPQSGPWTGDPVWLADVLRAEGLNVVELPGWLDRGHGDMGRLWGVVCHHTGSDNTPSSEIAFHPSLGLCSQIHLARNGTVTLCGVGIAWHAGVGSYPGLPEDNANAVTIGIEAQNSGTYDGAPHRTNWPDAQYDAYVKCCAAICRRLGVRADHVISHKEWAGRKQGKWDPGAIDMNIFRADVQRRIDAHQPNGEDDFMAALSADEQREVLNLLRVLADRRFVSRSPFRHLGEGPSETVAGFGLNTDGLNHAQYTIELARLGDPTHLALLREVASAEGDSRYPDRQYDAKLAKRVLAEIEGAATAPAKPSTPSAPTEPAPEAPTPPVKAACALSAAGCVVAGSTSGGGCALSTDGTGKCVVTAATDGGAA

SEQ ID NO: 213 - protein, 883 aa, Artificial Sequence
  58+20+110+14
GIGKFLKKAKKFMRRKFASYAGDLADTPLYDEAMTAAVAEMQARYSAAGQLRAGLYIPGIVGAETKYVMGYLPRPVVDTRPVLITVCGTGVPWWIGPDADTARAVEDKYLWQPIGYPAAPFPMGKSIAAAITETHNQANRWRERIETHGAALAGYSQGAVVVSELWMNHIAPEDGSLHWMKPHIEKAVTWGNPNRELGHVWADHGGSPRAPSNTQGVSSNGMRDTPPWWRDYAHQGDLYACTEPGDTQEVRNAIWQIVRDLDLFTGPDSLLAQVVELVQAPLPEAIAITKALLDAGMFFAKRTGPHVDYNVQPAIDYLRTIPQGRSHPVQPYPGAFMSFTRFLQDDPLLTREQVMAELIRVADELNMPDKRGACVIAGMTISQEVGVKDNDPPFERRFWCPANRADPESFNYPHDSESNDGRSVGYFQQQKGPNGELWWGTTASEMNLHSAATQFMTRLKAAGYNASNAQAANDSAQAIQRSGVPQAYKQWWDDINRLYDKVKGSGGGPAPAPKPPQSGPWTGDPVWLADVLRAEGLNVVELPGWLDRGHGDMGRLWGVVCHHTGSDNTPSSEIAFHPSLGLCSQIHLARNGTVTLCGVGIAWHAGVGSYPGLPEDNANAVTIGIEAQNSGTYDGAPHRTNWPDAQYDAYVKCCAAICRRLGVRADHVISHKEWAGRKQGKWDPGAIDMNIFRADVQRRIDAHQPNGEDDFMAALSADEQREVLNLLRVLADRRFVSRSPFRHLGEGPSETVAGFGLNTDGLNHAQYTIELARLGDPTHLALLREVASAEGDSRYPDRQYDAKLAKRVLAEIEGAATAPAKPSTPSAPTEPAPEAPTPPVKAACALSAAGCVVAGSTSGGGCALSTDGTGKCVVTAATDGGAA

SEQ ID NO: 214 - protein, 880 aa, Artificial Sequence
  40+32+104+14
FLGGLIKIVPAMICAVTKKCMRRKFSYAATLADTEFYDEAMTAVVAEMQSRYNTAGQLRDGLYIPGIINAETKYVMGYLSRPVIDTRPVLFTVCGTGVPWWVGPDADTARAVEDQYLWQPIGYPAAPFPMGRSITAGITEAHNQANRWRERIETHGTALAGYSQGAVVLSELWMNHIAPEDGSLRWMKPHVRKAVTWGNPNRELGHVWADHGGSPMAPSNTQGVSSNGMRNTPDWWRDYAHQGDLYACTEPGDTQEVRNAIWQIVRDLDLFTGPDSLLAQVIELAQAPLPETIAITRAILDAGMFFAKRTGPHVDYNPQPAIDYLRTAGAGAGMSFTRFLQDDPLLTREQVMAELIRVADELNMPDKRGACVIAGMTISQEVGVKDNDPPFERRFWCPANRADPESFNYPHDSESNDGRSVGYFQQQKGPNGELWWGTTASEMNLHSAATQFMTRLKAAGYNASNAQAANDSAQAIQRSGVPQAYKQWWDDINRLYDKVKGSGGGPAPAPKPPQSGPWTGDPVWLADVLRAEGLNVVELPGWLDRGHGDMGRLWGVVCHHTGSDNTPSSEIAFHPSLGLCSQIHLARNGTVTLCGVGIAWHAGVGSYPGLPEDNANAVTIGIEAQNSGTYDGAPHRTNWPDAQYDAYVKCCAAICRRLGVRADHVISHKEWAGRKQGKWDPGAIDMNIFRADVQRRIDAHQPNGEDDFMAALSADEQREVLNLLRVLADRRFVSRSPFRHLGEGPSETVAGFGLNTDGLNHAQYTIELARLGDPTHLALLREVASAEGDSRYPDRQYDAKLAKRVLAEIEGAATAPAKPSTPSAPTEPAPEAPTPPVKAACALSAAGCVVAGSTSGGGCALSTDGTGKCVVTAATDGGAA

SEQ ID NO: 215 - protein, 646 aa, Artificial Sequence
  102+34+112+10
ILGKIWKGIKSLFMTMAIVISLRKPARLAAFASAVLCAGAALATGPAPVASAEPCSDIEVVFARGTSEPAGIGRVGQALTDAIRNQVGGRTVSTYGVNYPATYDFLAAADGANDATNRIATLAEQCPSTRVVLGGYSQGAAVVDMLLGIPPLGNKVGNFGSAPPLPSNLMNNVAAVAVFGNPSAKFGIPVTSRFGGRAIDACSDGDPICSDGRNPFAHTHYESSPFIPQAAGLIAGLVPAVPPPMPVYAIQSGTVIYAGAASGYGGPDPAGWLVIDSDDAEGGGCLEYGHIVREVNRGDHVTAGQRIGHINPNNRTNGGVAPHLHVTDWPHAYGQGSRQNVMARLSGAREPEAQAAPTPTEQGTVVGDPVWLADVVRPTVAKFAEYPGWRNRGHGDFKDIRGVMVHHTGGPASAASIANGRPDLAGPLAQLHISRDGTVTVVAVGVAWHAGAGSYPWLPTNMGNWHLIGIECEWPYGEPGINERNAYTVRWRDPEIIALRNTCAAILLRLGLGVDRLIGHKDYAGRAQGKWDPGNMSMDWLRGEVRKDMDGFVFPGEDIVNVTPPPVPAPVPAPPATANVLLHRGMSGPNVVKLQTTLRRWYSKLAVDGDFGPHTEACVRDRQRIYGLDVDGIVGPLTAAKIGLVL

SEQ ID NO: 216 - protein, 799 aa, Artificial Sequence
  48+16+104+2
RGGRLCYCRRRFCVCVGRMSKPWLFTVHGTGQPDPLGPGLPADTARDVLDIYRWQPIGNYPAAAFPMWPSVEKGVAELILQIELKLDADPYADFAMAGYSQGAIVVGQVLKHHILPPTGRLHRFLHRLKKVIFWGNPMRQKGFAHSDEWIHPVAAPDTLGILEDRLENLEQYGFEVRDYAHDGDMYASIKEDDLHEYEVAIGRIVMKASGFIGGRDSVVAQLIELGQRPITEGIALAGAIIDALTFFARSRMGDKWPHLYNRYPAVEFLRQIAGAGAGMTERVLPYDRNIVPQETGWWCGPAATQVVLNSRGIIVPEATLANEIEQIENPGRGDDRDGTDYVGLIEQVLDRRVPEAKYTSVYMPNDPPTAAQREALWQNIVRSINAGWGVIMNWVAPPSNKPRGVKGSPNPKYSGGTTYHYVACMGYDDTPGARALWIADSGFQPFNYWISFDQAATLIPPKGYAYAATTATAPAPAPAPVDAAPILARAAGISEAKAREILPTFRDGLRLAECNNVPRIAMFIAQTGHESDNFNATQEYDHGRNYGDPNEATDRWKYKGRTWIQITWRGNYERFSRWCFDRKLVPTPTYFVDNPRALADVRWAGIGAAWYWTVERPSINRLCDERNLTEVTRLINGGTSWEAPTWMKHRKERYDRALAVGNDLLKLLDGEEEGFLSALTPKEQRELYDEIMKRGPSRSFLADDGRQIETLLGFIYNIDGNAWNIVNILGCLIGVPECVDDIRDVAENGVRKGSYAESNPWLAQFGQEFCKRLLPLAGKLSELLNAQEFKVTHNRIIEQ

SEQ ID NO: 217 - protein, 884 aa, Artificial Sequence
  40+20+106+14
FLGGLIKIVPAMICAVTKKCMRRKFASYAGDLADTPLYDEAMTAAVAEMQARYSAAGQLRAGLYIPGIVGAETKYVMGYLPRPVVDTRPVLITVCGTGVPWWIGPDADTARAVEDKYLWQPIGYPAAPFPMGKSIAAAITETHNQANRWRERIETHGAALAGYSQGAVVVSELWMNHIAPEDGSLHWMKPHIEKAVTWGNPNRELGHVWADHGGSPRAPSNTQGVSSNGMRDTPPWWRDYAHQGDLYACTEPGDTQEVRNAIWQIVRDLDLFTGPDSLLAQVVELVQAPLPEAIAITKALLDAGMFFAKRTGPHVDYNVQPAIDYLRTLSRFFHAELMSFTRFLQDDPLLTREQVMAELIRVADELNMPDKRGACVIAGMTISQEVGVKDNDPPFERRFWCPANRADPESFNYPHDSESNDGRSVGYFQQQKGPNGELWWGTTASEMNLHSAATQFMTRLKAAGYNASNAQAANDSAQAIQRSGVPQAYKQWWDDINRLYDKVKGSGGGPAPAPKPPQSGPWTGDPVWLADVLRAEGLNVVELPGWLDRGHGDMGRLWGVVCHHTGSDNTPSSEIAFHPSLGLCSQIHLARNGTVTLCGVGIAWHAGVGSYPGLPEDNANAVTIGIEAQNSGTYDGAPHRTNWPDAQYDAYVKCCAAICRRLGVRADHVISHKEWAGRKQGKWDPGAIDMNIFRADVQRRIDAHQPNGEDDFMAALSADEQREVLNLLRVLADRRFVSRSPFRHLGEGPSETVAGFGLNTDGLNHAQYTIELARLGDPTHLALLREVASAEGDSRYPDRQYDAKLAKRVLAEIEGAATAPAKPSTPSAPTEPAPEAPTPPVKAACALSAAGCVVAGSTSGGGCALSTDGTGKCVVTAATDGGAA

SEQ ID NO: 218 - protein, 864 aa, Artificial Sequence
  36+18+112+14
KFFRKLKKSVKKRAKEFFKKPRVIGVSIPFMLNGEFYVPAGTIITANGTGVPDGAGPGFGADLARELERVAEGMWIWKWINYPAAVMPMRPSINTLRLALKEMIRTTPGKIVLSAYSQSAVAFAYVWRDDILNPDGELHDRLDDIVAVILYGNPVRAPGIAYGNELGGQSAPGKLNGHVTGGIAGPDCLRPEECVHPVTGRRIVLDFANAGDLYAAAPVGAEPWVKETEVGHNETLIYEAVMDFNGRDILAFAKEIAQILTMPLSQVVPLVQAIINGLSFLVQGPKAPHWTYTIGPAVDYLVRTGNELRKNPAVPPPMSFTRFLQDDPLLTREQVMAELIRVADELNMPDKRGACVIAGMTISQEVGVKDNDPPFERRFWCPANRADPESFNYPHDSESNDGRSVGYFQQQKGPNGELWWGTTASEMNLHSAATQFMTRLKAAGYNASNAQAANDSAQAIQRSGVPQAYKQWWDDINRLYDKVKGSGGGPAPAPKPPQSGPWTGDPVWLADVLRAEGLNVVELPGWLDRGHGDMGRLWGVVCHHTGSDNTPSSEIAFHPSLGLCSQIHLARNGTVTLCGVGIAWHAGVGSYPGLPEDNANAVTIGIEAQNSGTYDGAPHRTNWPDAQYDAYVKCCAAICRRLGVRADHVISHKEWAGRKQGKWDPGAIDMNIFRADVQRRIDAHQPNGEDDFMAALSADEQREVLNLLRVLADRRFVSRSPFRHLGEGPSETVAGFGLNTDGLNHAQYTIELARLGDPTHLALLREVASAEGDSRYPDRQYDAKLAKRVLAEIEGAATAPAKPSTPSAPTEPAPEAPTPPVKAACALSAAGCVVAGSTSGGGCALSTDGTGKCVVTAATDGGAA

SEQ ID NO: 219 - protein, 761 aa, Artificial Sequence
  38+16+112+4
WRSLGRTLLRLSHALKPLARRSGWMSKPWLFTVHGTGQPDPLGPGLPADTARDVLDIYRWQPIGNYPAAAFPMWPSVEKGVAELILQIELKLDADPYADFAMAGYSQGAIVVGQVLKHHILPPTGRLHRFLHRLKKVIFWGNPMRQKGFAHSDEWIHPVAAPDTLGILEDRLENLEQYGFEVRDYAHDGDMYASIKEDDLHEYEVAIGRIVMKASGFIGGRDSVVAQLIELGQRPITEGIALAGAIIDALTFFARSRMGDKWPHLYNRYPAVEFLRQIPAVPPPMPRVVYGLTHSSNGWPMLNSDECEWTKIPGTSVTLQIAKGQPLAILRAFAADFHAYVEPLRDADSACWTPTNSVPSSNHLSGTAMDLNWNTHPFQVPDAGFDAAKKARVKELLDFYEGMVFWGNDWSSPKDAMHFQLASLRNGGTFDTYGNPKTADFIARKIRADGYSTFRRGSAPASAAPILAAATGLSEARAAEILPAVRSGLRESECTNVNRIAMWLAQIGHESGSFQYTEEIAKNGRYAPYIGRTWIQITWDYNYRSFSQWAYAFGMVPTPDYFVVNYRELADLKWAGIGPAWYWTVARPDINELSDRRDLNTVTRRINGGTNGLADRQARYNRALAQGDALLQLLHEEDDFLSALTDAEQRELLDLARQQAKYKRKSRSPLHWPHEGEVDTIAGLSWSTDANVHIQLVEKLAVIYGDPVSIALLYAVSNSDDPTNNPELAKRILKRVKPEDITAAQVQIQKWLAAEQKFHAA

SEQ ID NO: 220 - protein, 886 aa, Artificial Sequence
  86+20+106+14
RPWAGNGSVHRYTVLSPRLKTQMRRKFASYAGDLADTPLYDEAMTAAVAEMQARYSAAGQLRAGLYIPGIVGAETKYVMGYLPRPVVDTRPVLITVCGTGVPWWIGPDADTARAVEDKYLWQPIGYPAAPFPMGKSIAAAITETHNQANRWRERIETHGAALAGYSQGAVVVSELWMNHIAPEDGSLHWMKPHIEKAVTWGNPNRELGHVWADHGGSPRAPSNTQGVSSNGMRDTPPWWRDYAHQGDLYACTEPGDTQEVRNAIWQIVRDLDLFTGPDSLLAQVVELVQAPLPEAIAITKALLDAGMFFAKRTGPHVDYNVQPAIDYLRTLSRFFHAELMSFTRFLQDDPLLTREQVMAELIRVADELNMPDKRGACVIAGMTISQEVGVKDNDPPFERRFWCPANRADPESFNYPHDSESNDGRSVGYFQQQKGPNGELWWGTTASEMNLHSAATQFMTRLKAAGYNASNAQAANDSAQAIQRSGVPQAYKQWWDDINRLYDKVKGSGGGPAPAPKPPQSGPWTGDPVWLADVLRAEGLNVVELPGWLDRGHGDMGRLWGVVCHHTGSDNTPSSEIAFHPSLGLCSQIHLARNGTVTLCGVGIAWHAGVGSYPGLPEDNANAVTIGIEAQNSGTYDGAPHRTNWPDAQYDAYVKCCAAICRRLGVRADHVISHKEWAGRKQGKWDPGAIDMNIFRADVQRRIDAHQPNGEDDFMAALSADEQREVLNLLRVLADRRFVSRSPFRHLGEGPSETVAGFGLNTDGLNHAQYTIELARLGDPTHLALLREVASAEGDSRYPDRQYDAKLAKRVLAEIEGAATAPAKPSTPSAPTEPAPEAPTPPVKAACALSAAGCVVAGSTSGGGCALSTDGTGKCVVTAATDGGAA

SEQ ID NO: 221 - protein, 696 aa, Artificial Sequence
  96+16+106+10
LVQRGRFGRFLRKIRRFRPKVTITIQGSARFMSKPWLFTVHGTGQPDPLGPGLPADTARDVLDIYRWQPIGNYPAAAFPMWPSVEKGVAELILQIELKLDADPYADFAMAGYSQGAIVVGQVLKHHILPPTGRLHRFLHRLKKVIFWGNPMRQKGFAHSDEWIHPVAAPDTLGILEDRLENLEQYGFEVRDYAHDGDMYASIKEDDLHEYEVAIGRIVMKASGFIGGRDSVVAQLIELGQRPITEGIALAGAIIDALTFFARSRMGDKWPHLYNRYPAVEFLRQILSRFFHAELMPVYAIQSGTVIYAGAASGYGGPDPAGWLVIDSDDAEGGGCLEYGHIVREVNRGDHVTAGQRIGHINPNNRTNGGVAPHLHVTDWPHAYGQGSRQNVMARLSGAREPEAQAAPTPTEQGTVVGDPVWLADVVRPTVAKFAEYPGWRNRGHGDFKDIRGVMVHHTGGPASAASIANGRPDLAGPLAQLHISRDGTVTVVAVGVAWHAGAGSYPWLPTNMGNWHLIGIECEWPYGEPGINERNAYTVRWRDPEIIALRNTCAAILLRLGLGVDRLIGHKDYAGRAQGKWDPGNMSMDWLRGEVRKDMDGFVFPGEDIVNVTPPPVPAPVPAPPATANVLLHRGMSGPNVVKLQTTLRRWYSKLAVDGDFGPHTEACVRDRQRIYGLDVDGIVGPLTAAKIGLVL

SEQ ID NO: 222 - protein, 677 aa, Artificial Sequence
  44+26+110+10
FFHHIFRGKVHVGKTIHRLVTGMWSGYPADLARRVEDLYYFQPIYYGPGGIPATVPMGASAQSGVDMGVRLVLECEARPSRDVPDGYALCGYSQGGMVVSALLDEFRTGRLRHLNGKLMAGSTFGNPWRELDSNGGRGISDRRIVGTPDFWVDEFDPGDIYANVPNNDVGDDMTAIFKLVQLRSLADLIGIGSIMDRVMDVLRGPLSGMRSVVEAIVRGLLFFGRKPPTAPHTEYHLREVRPGVTYFEHAVAHMRAMAAIPQGRSHPVQPYPGAFMPVYAIQSGTVIYAGAASGYGGPDPAGWLVIDSDDAEGGGCLEYGHIVREVNRGDHVTAGQRIGHINPNNRTNGGVAPHLHVTDWPHAYGQGSRQNVMARLSGAREPEAQAAPTPTEQGTVVGDPVWLADVVRPTVAKFAEYPGWRNRGHGDFKDIRGVMVHHTGGPASAASIANGRPDLAGPLAQLHISRDGTVTVVAVGVAWHAGAGSYPWLPTNMGNWHLIGIECEWPYGEPGINERNAYTVRWRDPEIIALRNTCAAILLRLGLGVDRLIGHKDYAGRAQGKWDPGNMSMDWLRGEVRKDMDGFVFPGEDIVNVTPPPVPAPVPAPPATANVLLHRGMSGPNVVKLQTTLRRWYSKLAVDGDFGPHTEACVRDRQRIYGLDVDGIVGPLTAAKIGLVL

SEQ ID NO: 223 - protein, 864 aa, Artificial Sequence
  40+32+110+2
FLGGLIKIVPAMICAVTKKCMRRKFSYAATLADTEFYDEAMTAVVAEMQSRYNTAGQLRDGLYIPGIINAETKYVMGYLSRPVIDTRPVLFTVCGTGVPWWVGPDADTARAVEDQYLWQPIGYPAAPFPMGRSITAGITEAHNQANRWRERIETHGTALAGYSQGAVVLSELWMNHIAPEDGSLRWMKPHVRKAVTWGNPNRELGHVWADHGGSPMAPSNTQGVSSNGMRNTPDWWRDYAHQGDLYACTEPGDTQEVRNAIWQIVRDLDLFTGPDSLLAQVIELAQAPLPETIAITRAILDAGMFFAKRTGPHVDYNPQPAIDYLRTIPQGRSHPVQPYPGAFMTERVLPYDRNIVPQETGWWCGPAATQVVLNSRGIIVPEATLANEIEQIENPGRGDDRDGTDYVGLIEQVLDRRVPEAKYTSVYMPNDPPTAAQREALWQNIVRSINAGWGVIMNWVAPPSNKPRGVKGSPNPKYSGGTTYHYVACMGYDDTPGARALWIADSGFQPFNYWISFDQAATLIPPKGYAYAATTATAPAPAPAPVDAAPILARAAGISEAKAREILPTFRDGLRLAECNNVPRIAMFIAQTGHESDNFNATQEYDHGRNYGDPNEATDRWKYKGRTWIQITWRGNYERFSRWCFDRKLVPTPTYFVDNPRALADVRWAGIGAAWYWTVERPSINRLCDERNLTEVTRLINGGTSWEAPTWMKHRKERYDRALAVGNDLLKLLDGEEEGFLSALTPKEQRELYDEIMKRGPSRSFLADDGRQIETLLGFIYNIDGNAWNIVNILGCLIGVPECVDDIRDVAENGVRKGSYAESNPWLAQFGQEFCKRLLPLAGKLSELLNAQEFKVTHNRIIEQ

SEQ ID NO: 224 - protein, 761 aa, Artificial Sequence
  38+16+104+4
WRSLGRTLLRLSHALKPLARRSGWMSKPWLFTVHGTGQPDPLGPGLPADTARDVLDIYRWQPIGNYPAAAFPMWPSVEKGVAELILQIELKLDADPYADFAMAGYSQGAIVVGQVLKHHILPPTGRLHRFLHRLKKVIFWGNPMRQKGFAHSDEWIHPVAAPDTLGILEDRLENLEQYGFEVRDYAHDGDMYASIKEDDLHEYEVAIGRIVMKASGFIGGRDSVVAQLIELGQRPITEGIALAGAIIDALTFFARSRMGDKWPHLYNRYPAVEFLRQIAGAGAGMPRVVYGLTHSSNGWPMLNSDECEWTKIPGTSVTLQIAKGQPLAILRAFAADFHAYVEPLRDADSACWTPTNSVPSSNHLSGTAMDLNWNTHPFQVPDAGFDAAKKARVKELLDFYEGMVFWGNDWSSPKDAMHFQLASLRNGGTFDTYGNPKTADFIARKIRADGYSTFRRGSAPASAAPILAAATGLSEARAAEILPAVRSGLRESECTNVNRIAMWLAQIGHESGSFQYTEEIAKNGRYAPYIGRTWIQITWDYNYRSFSQWAYAFGMVPTPDYFVVNYRELADLKWAGIGPAWYWTVARPDINELSDRRDLNTVTRRINGGTNGLADRQARYNRALAQGDALLQLLHEEDDFLSALTDAEQRELLDLARQQAKYKRKSRSPLHWPHEGEVDTIAGLSWSTDANVHIQLVEKLAVIYGDPVSIALLYAVSNSDDPTNNPELAKRILKRVKPEDITAAQVQIQKWLAAEQKFHAA

SEQ ID NO: 225 - protein, 731 aa, Artificial Sequence
  36+20+106+12
KFFRKLKKSVKKRAKEFFKKPRVIGVSIPFMRRKFASYAGDLADTPLYDEAMTAAVAEMQARYSAAGQLRAGLYIPGIVGAETKYVMGYLPRPVVDTRPVLITVCGTGVPWWIGPDADTARAVEDKYLWQPIGYPAAPFPMGKSIAAAITETHNQANRWRERIETHGAALAGYSQGAVVVSELWMNHIAPEDGSLHWMKPHIEKAVTWGNPNRELGHVWADHGGSPRAPSNTQGVSSNGMRDTPPWWRDYAHQGDLYACTEPGDTQEVRNAIWQIVRDLDLFTGPDSLLAQVVELVQAPLPEAIAITKALLDAGMFFAKRTGPHVDYNVQPAIDYLRTLSRFFHAELMTTKDQVAQITIAEAKARGYTRSECLAIMSTFYQESGWNDTIWDPTHTTYGIAQQDGSYPHRFDGAAAQIKGFFDKLDVWRAKPGASTDIWLNICWMQQAPNWPSADYWYANGRRAYLTEIKSRIATVTPYLDKYWPADGGTAVPDEPRPDFNEFPIWSNNNSARSGKPTMFLIHTQEGGGGDAAAENLAKWFQNGNGVSYHYTISQASDGGVTVVDCVDTDRAAWSVGNANSISINLCFAGSRASWMRDQWMKQSNAIDVAAYLAVQDAKKYGFTPLVVPPPYTNGRPGISDHRWVTDVFKWGTHTDVGDWFPWDYFAERVNHWANGGKTEPEPPKVKRFPDDWSDREILVEILRQLRGYNLTGWPQLGGKTLVDAVAELLGH

SEQ ID NO: 226 - protein, 806 aa, Artificial Sequence
  48+34+110+14
RGGRLCYCRRRFCVCVGRMTMAIVISLRKPARLAAFASAVLCAGAALATGPAPVASAEPCSDIEVVFARGTSEPAGIGRVGQALTDAIRNQVGGRTVSTYGVNYPATYDFLAAADGANDATNRIATLAEQCPSTRVVLGGYSQGAAVVDMLLGIPPLGNKVGNFGSAPPLPSNLMNNVAAVAVFGNPSAKFGIPVTSRFGGRAIDACSDGDPICSDGRNPFAHTHYESSPFIPQAAGLIAGLVIPQGRSHPVQPYPGAFMSFTRFLQDDPLLTREQVMAELIRVADELNMPDKRGACVIAGMTISQEVGVKDNDPPFERRFWCPANRADPESFNYPHDSESNDGRSVGYFQQQKGPNGELWWGTTASEMNLHSAATQFMTRLKAAGYNASNAQAANDSAQAIQRSGVPQAYKQWWDDINRLYDKVKGSGGGPAPAPKPPQSGPWTGDPVWLADVLRAEGLNVVELPGWLDRGHGDMGRLWGVVCHHTGSDNTPSSEIAFHPSLGLCSQIHLARNGTVTLCGVGIAWHAGVGSYPGLPEDNANAVTIGIEAQNSGTYDGAPHRTNWPDAQYDAYVKCCAAICRRLGVRADHVISHKEWAGRKQGKWDPGAIDMNIFRADVQRRIDAHQPNGEDDFMAALSADEQREVLNLLRVLADRRFVSRSPFRHLGEGPSETVAGFGLNTDGLNHAQYTIELARLGDPTHLALLREVASAEGDSRYPDRQYDAKLAKRVLAEIEGAATAPAKPSTPSAPTEPAPEAPTPPVKAACALSAAGCVVAGSTSGGGCALSTDGTGKCVVTAATDGGAA

SEQ ID NO: 227 - protein, 831 aa, Artificial Sequence
  38+30+112+14
WRSLGRTLLRLSHALKPLARRSGWMSKPWLFTVHGTGQPDPLGPGLPADTARDVLDIYRWQPIGNYPAAAFPMWPSVEKGVAELILQIELKLDADPYADFALAGYSQGAIVVGQVLKHHIINPRGRLHRFLHRLRKVIFWGNPMRQKGFAHTDEWIHQVAASDTMGILEDRLENLEQYGFEVRDYAHDGDMYASIKEDDMHEYEVAIGRIVMSARRFIGGKDSVIAQLIELGQRPIWEGIAMARAIIDALTFFAKSTQGPSWPHLYNRFPAVEFLRRIPAVPPPMSFTRFLQDDPLLTREQVMAELIRVADELNMPDKRGACVIAGMTISQEVGVKDNDPPFERRFWCPANRADPESFNYPHDSESNDGRSVGYFQQQKGPNGELWWGTTASEMNLHSAATQFMTRLKAAGYNASNAQAANDSAQAIQRSGVPQAYKQWWDDINRLYDKVKGSGGGPAPAPKPPQSGPWTGDPVWLADVLRAEGLNVVELPGWLDRGHGDMGRLWGVVCHHTGSDNTPSSEIAFHPSLGLCSQIHLARNGTVTLCGVGIAWHAGVGSYPGLPEDNANAVTIGIEAQNSGTYDGAPHRTNWPDAQYDAYVKCCAAICRRLGVRADHVISHKEWAGRKQGKWDPGAIDMNIFRADVQRRIDAHQPNGEDDFMAALSADEQREVLNLLRVLADRRFVSRSPFRHLGEGPSETVAGFGLNTDGLNHAQYTIELARLGDPTHLALLREVASAEGDSRYPDRQYDAKLAKRVLAEIEGAATAPAKPSTPSAPTEPAPEAPTPPVKAACALSAAGCVVAGSTSGGGCALSTDGTGKCVVTAATDGGAA

SEQ ID NO: 228 - protein, 716 aa, Artificial Sequence
  38+18+106+10
WRSLGRTLLRLSHALKPLARRSGWMLNGEFYVPAGTIITANGTGVPDGAGPGFGADLARELERVAEGMWIWKWINYPAAVMPMRPSINTLRLALKEMIRTTPGKIVLSAYSQSAVAFAYVWRDDILNPDGELHDRLDDIVAVILYGNPVRAPGIAYGNELGGQSAPGKLNGHVTGGIAGPDCLRPEECVHPVTGRRIVLDFANAGDLYAAAPVGAEPWVKETEVGHNETLIYEAVMDFNGRDILAFAKEIAQILTMPLSQVVPLVQAIINGLSFLVQGPKAPHWTYTIGPAVDYLVRTGNELRKNLSRFFHAELMPVYAIQSGTVIYAGAASGYGGPDPAGWLVIDSDDAEGGGCLEYGHIVREVNRGDHVTAGQRIGHINPNNRTNGGVAPHLHVTDWPHAYGQGSRQNVMARLSGAREPEAQAAPTPTEQGTVVGDPVWLADVVRPTVAKFAEYPGWRNRGHGDFKDIRGVMVHHTGGPASAASIANGRPDLAGPLAQLHISRDGTVTVVAVGVAWHAGAGSYPWLPTNMGNWHLIGIECEWPYGEPGINERNAYTVRWRDPEIIALRNTCAAILLRLGLGVDRLIGHKDYAGRAQGKWDPGNMSMDWLRGEVRKDMDGFVFPGEDIVNVTPPPVPAPVPAPPATANVLLHRGMSGPNVVKLQTTLRRWYSKLAVDGDFGPHTEACVRDRQRIYGLDVDGIVGPLTAAKIGLVL

SEQ ID NO: 229 - protein, 794 aa, Artificial Sequence; identical to SEQ ID NO: 206
  36+26+112+2

SEQ ID NO: 230 - protein, 894 aa, Artificial Sequence
  36+20+106+14
KFFRKLKKSVKKRAKEFFKKPRVIGVSIPFMRRKFASYAGDLADTPLYDEAMTAAVAEMQARYSAAGQLRAGLYIPGIVGAETKYVMGYLPRPVVDTRPVLITVCGTGVPWWIGPDADTARAVEDKYLWQPIGYPAAPFPMGKSIAAAITETHNQANRWRERIETHGAALAGYSQGAVVVSELWMNHIAPEDGSLHWMKPHIEKAVTWGNPNRELGHVWADHGGSPRAPSNTQGVSSNGMRDTPPWWRDYAHQGDLYACTEPGDTQEVRNAIWQIVRDLDLFTGPDSLLAQVVELVQAPLPEAIAITKALLDAGMFFAKRTGPHVDYNVQPAIDYLRTLSRFFHAELMSFTRFLQDDPLLTREQVMAELIRVADELNMPDKRGACVIAGMTISQEVGVKDNDPPFERRFWCPANRADPESFNYPHDSESNDGRSVGYFQQQKGPNGELWWGTTASEMNLHSAATQFMTRLKAAGYNASNAQAANDSAQAIQRSGVPQAYKQWWDDINRLYDKVKGSGGGPAPAPKPPQSGPWTGDPVWLADVLRAEGLNVVELPGWLDRGHGDMGRLWGVVCHHTGSDNTPSSEIAFHPSLGLCSQIHLARNGTVTLCGVGIAWHAGVGSYPGLPEDNANAVTIGIEAQNSGTYDGAPHRTNWPDAQYDAYVKCCAAICRRLGVRADHVISHKEWAGRKQGKWDPGAIDMNIFRADVQRRIDAHQPNGEDDFMAALSADEQREVLNLLRVLADRRFVSRSPFRHLGEGPSETVAGFGLNTDGLNHAQYTIELARLGDPTHLALLREVASAEGDSRYPDRQYDAKLAKRVLAEIEGAATAPAKPSTPSAPTEPAPEAPTPPVKAACALSAAGCVVAGSTSGGGCALSTDGTGKCVVTAATDGGAA

SEQ ID NO: 231 - protein, 765 aa, Artificial Sequence
  36+24+110+10
KFFRKLKKSVKKRAKEFFKKPRVIGVSIPFMVAAWTAVMRIRFASYALGVNGLPIKVDGYFGYDEEKVQKEYQRRTGQFPSGQVSREDLHRLGLLPTLISIHGTGQADPFGIGYPADIARRVLDLYWWQPLGNYPAKAVPMNGSVDQGEREGVRLISDPLIVPGPTAFVDYSQGSVIGGRLRNRMRRKELRGELVAAASFGNPMRLRGHYAGNVDPGGEGIDPRQELAAEPFRIELAAKGDLYTTCPGGQSGEMERAIYHAVFSKFIGEDTLIEQVWELAKNPFREVPAAVKAIVRGGMFAIRGTGPHVRYHIDQCPGTGMTYYEYAVKHLRDTADARLRRIVASVTIPQGRSHPVQPYPGAFMPVYAIQSGTVIYAGAASGYGGPDPAGWLVIDSDDAEGGGCLEYGHIVREVNRGDHVTAGQRIGHINPNNRTNGGVAPHLHVTDWPHAYGQGSRQNVMARLSGAREPEAQAAPTPTEQGTVVGDPVWLADVVRPTVAKFAEYPGWRNRGHGDFKDIRGVMVHHTGGPASAASIANGRPDLAGPLAQLHISRDGTVTVVAVGVAWHAGAGSYPWLPTNMGNWHLIGIECEWPYGEPGINERNAYTVRWRDPEIIALRNTCAAILLRLGLGVDRLIGHKDYAGRAQGKWDPGNMSMDWLRGEVRKDMDGFVFPGEDIVNVTPPPVPAPVPAPPATANVLLHRGMSGPNVVKLQTTLRRWYSKLAVDGDFGPHTEACVRDRQRIYGLDVDGIVGPLTAAKIGLVL

SEQ ID NO: 232 - protein, 838 aa, Artificial Sequence
  36+18+104+2
KFFRKLKKSVKKRAKEFFKKPRVIGVSIPFMLNGEFYVPAGTIITANGTGVPDGAGPGFGADLARELERVAEGMWIWKWINYPAAVMPMRPSINTLRLALKEMIRTTPGKIVLSAYSQSAVAFAYVWRDDILNPDGELHDRLDDIVAVILYGNPVRAPGIAYGNELGGQSAPGKLNGHVTGGIAGPDCLRPEECVHPVTGRRIVLDFANAGDLYAAAPVGAEPWVKETEVGHNETLIYEAVMDFNGRDILAFAKEIAQILTMPLSQVVPLVQAIINGLSFLVQGPKAPHWTYTIGPAVDYLVRTGNELRKNAGAGAGMTERVLPYDRNIVPQETGWWCGPAATQVVLNSRGIIVPEATLANEIEQIENPGRGDDRDGTDYVGLIEQVLDRRVPEAKYTSVYMPNDPPTAAQREALWQNIVRSINAGWGVIMNWVAPPSNKPRGVKGSPNPKYSGGTTYHYVACMGYDDTPGARALWIADSGFQPFNYWISFDQAATLIPPKGYAYAATTATAPAPAPAPVDAAPILARAAGISEAKAREILPTFRDGLRLAECNNVPRIAMFIAQTGHESDNFNATQEYDHGRNYGDPNEATDRWKYKGRTWIQITWRGNYERFSRWCFDRKLVPTPTYFVDNPRALADVRWAGIGAAWYWTVERPSINRLCDERNLTEVTRLINGGTSWEAPTWMKHRKERYDRALAVGNDLLKLLDGEEEGFLSALTPKEQRELYDEIMKRGPSRSFLADDGRQIETLLGFIYNIDGNAWNIVNILGCLIGVPECVDDIRDVAENGVRKGSYAESNPWLAQFGQEFCKRLLPLAGKLSELLNAQEFKVTHNRIIEQ

SEQ ID NO: 233 - protein, 745 aa, Artificial Sequence
  76+26+104+4
FIHHIIGGLFSAGKAIHRLIRRRRRMWSGYPADLARRVEDLYYFQPIYYGPGGIPATVPMGASAQSGVDMGVRLVLECEARPSRDVPDGYALCGYSQGGMVVSALLDEFRTGRLRHLNGKLMAGSTFGNPWRELDSNGGRGISDRRIVGTPDFWVDEFDPGDIYANVPNNDVGDDMTAIFKLVQLRSLADLIGIGSIMDRVMDVLRGPLSGMRSVVEAIVRGLLFFGRKPPTAPHTEYHLREVRPGVTYFEHAVAHMRAMAAAGAGAGMPRVVYGLTHSSNGWPMLNSDECEWTKIPGTSVTLQIAKGQPLAILRAFAADFHAYVEPLRDADSACWTPTNSVPSSNHLSGTAMDLNWNTHPFQVPDAGFDAAKKARVKELLDFYEGMVFWGNDWSSPKDAMHFQLASLRNGGTFDTYGNPKTADFIARKIRADGYSTFRRGSAPASAAPILAAATGLSEARAAEILPAVRSGLRESECTNVNRIAMWLAQIGHESGSFQYTEEIAKNGRYAPYIGRTWIQITWDYNYRSFSQWAYAFGMVPTPDYFVVNYRELADLKWAGIGPAWYWTVARPDINELSDRRDLNTVTRRINGGTNGLADRQARYNRALAQGDALLQLLHEEDDFLSALTDAEQRELLDLARQQAKYKRKSRSPLHWPHEGEVDTIAGLSWSTDANVHIQLVEKLAVIYGDPVSIALLYAVSNSDDPTNNPELAKRILKRVKPEDITAAQVQIQKWLAAEQKFHAA

SEQ ID NO: 234 - protein, 894 aa, Artificial Sequence; identical to SEQ ID NO: 230
  36+20+106+14

SEQ ID NO: 235 - protein, 684 aa, Artificial Sequence
  58+30+110+10
GIGKFLKKAKKFMSKPWLFTVHGTGQPDPLGPGLPADTARDVLDIYRWQPIGNYPAAAFPMWPSVEKGVAELILQIELKLDADPYADFALAGYSQGAIVVGQVLKHHIINPRGRLHRFLHRLRKVIFWGNPMRQKGFAHTDEWIHQVAASDTMGILEDRLENLEQYGFEVRDYAHDGDMYASIKEDDMHEYEVAIGRIVMSARRFIGGKDSVIAQLIELGQRPIWEGIAMARAIIDALTFFAKSTQGPSWPHLYNRFPAVEFLRRIIPQGRSHPVQPYPGAFMPVYAIQSGTVIYAGAASGYGGPDPAGWLVIDSDDAEGGGCLEYGHIVREVNRGDHVTAGQRIGHINPNNRTNGGVAPHLHVTDWPHAYGQGSRQNVMARLSGAREPEAQAAPTPTEQGTVVGDPVWLADVVRPTVAKFAEYPGWRNRGHGDFKDIRGVMVHHTGGPASAASIANGRPDLAGPLAQLHISRDGTVTVVAVGVAWHAGAGSYPWLPTNMGNWHLIGIECEWPYGEPGINERNAYTVRWRDPEIIALRNTCAAILLRLGLGVDRLIGHKDYAGRAQGKWDPGNMSMDWLRGEVRKDMDGFVFPGEDIVNVTPPPVPAPVPAPPATANVLLHRGMSGPNVVKLQTTLRRWYSKLAVDGDFGPHTEACVRDRQRIYGLDVDGIVGPLTAAKIGLVL

SEQ ID NO: 236 - protein, 885 aa, Artificial Sequence
  38+20+112+14
WRSLGRTLLRLSHALKPLARRSGWMRRKFASYAGDLADTPLYDEAMTAAVAEMQARYSAAGQLRAGLYIPGIVGAETKYVMGYLPRPVVDTRPVLITVCGTGVPWWIGPDADTARAVEDKYLWQPIGYPAAPFPMGKSIAAAITETHNQANRWRERIETHGAALAGYSQGAVVVSELWMNHIAPEDGSLHWMKPHIEKAVTWGNPNRELGHVWADHGGSPRAPSNTQGVSSNGMRDTPPWWRDYAHQGDLYACTEPGDTQEVRNAIWQIVRDLDLFTGPDSLLAQVVELVQAPLPEAIAITKALLDAGMFFAKRTGPHVDYNVQPAIDYLRTPAVPPPMSFTRFLQDDPLLTREQVMAELIRVADELNMPDKRGACVIAGMTISQEVGVKDNDPPFERRFWCPANRADPESFNYPHDSESNDGRSVGYFQQQKGPNGELWWGTTASEMNLHSAATQFMTRLKAAGYNASNAQAANDSAQAIQRSGVPQAYKQWWDDINRLYDKVKGSGGGPAPAPKPPQSGPWTGDPVWLADVLRAEGLNVVELPGWLDRGHGDMGRLWGVVCHHTGSDNTPSSEIAFHPSLGLCSQIHLARNGTVTLCGVGIAWHAGVGSYPGLPEDNANAVTIGIEAQNSGTYDGAPHRTNWPDAQYDAYVKCCAAICRRLGVRADHVISHKEWAGRKQGKWDPGAIDMNIFRADVQRRIDAHQPNGEDDFMAALSADEQREVLNLLRVLADRRFVSRSPFRHLGEGPSETVAGFGLNTDGLNHAQYTIELARLGDPTHLALLREVASAEGDSRYPDRQYDAKLAKRVLAEIEGAATAPAKPSTPSAPTEPAPEAPTPPVKAACALSAAGCVVAGSTSGGGCALSTDGTGKCVVTAATDGGAA

SEQ ID NO: 237 - protein, 874 aa, Artificial Sequence
  36+32+110+2
KFFRKLKKSVKKRAKEFFKKPRVIGVSIPFMRRKFSYAATLADTEFYDEAMTAVVAEMQSRYNTAGQLRDGLYIPGIINAETKYVMGYLSRPVIDTRPVLFTVCGTGVPWWVGPDADTARAVEDQYLWQPIGYPAAPFPMGRSITAGITEAHNQANRWRERIETHGTALAGYSQGAVVLSELWMNHIAPEDGSLRWMKPHVRKAVTWGNPNRELGHVWADHGGSPMAPSNTQGVSSNGMRNTPDWWRDYAHQGDLYACTEPGDTQEVRNAIWQIVRDLDLFTGPDSLLAQVIELAQAPLPETIAITRAILDAGMFFAKRTGPHVDYNPQPAIDYLRTIPQGRSHPVQPYPGAFMTERVLPYDRNIVPQETGWWCGPAATQVVLNSRGIIVPEATLANEIEQIENPGRGDDRDGTDYVGLIEQVLDRRVPEAKYTSVYMPNDPPTAAQREALWQNIVRSINAGWGVIMNWVAPPSNKPRGVKGSPNPKYSGGTTYHYVACMGYDDTPGARALWIADSGFQPFNYWISFDQAATLIPPKGYAYAATTATAPAPAPAPVDAAPILARAAGISEAKAREILPTFRDGLRLAECNNVPRIAMFIAQTGHESDNFNATQEYDHGRNYGDPNEATDRWKYKGRTWIQITWRGNYERFSRWCFDRKLVPTPTYFVDNPRALADVRWAGIGAAWYWTVERPSINRLCDERNLTEVTRLINGGTSWEAPTWMKHRKERYDRALAVGNDLLKLLDGEEEGFLSALTPKEQRELYDEIMKRGPSRSFLADDGRQIETLLGFIYNIDGNAWNIVNILGCLIGVPECVDDIRDVAENGVRKGSYAESNPWLAQFGQEFCKRLLPLAGKLSELLNAQEFKVTHNRIIEQ

SEQ ID NO: 238 - protein, 842 aa, Artificial Sequence
  76+16+110+14
FIHHIIGGLFSAGKAIHRLIRRRRRMSKPWLFTVHGTGQPDPLGPGLPADTARDVLDIYRWQPIGNYPAAAFPMWPSVEKGVAELILQIELKLDADPYADFAMAGYSQGAIVVGQVLKHHILPPTGRLHRFLHRLKKVIFWGNPMRQKGFAHSDEWIHPVAAPDTLGILEDRLENLEQYGFEVRDYAHDGDMYASIKEDDLHEYEVAIGRIVMKASGFIGGRDSVVAQLIELGQRPITEGIALAGAIIDALTFFARSRMGDKWPHLYNRYPAVEFLRQIIPQGRSHPVQPYPGAFMSFTRFLQDDPLLTREQVMAELIRVADELNMPDKRGACVIAGMTISQEVGVKDNDPPFERRFWCPANRADPESFNYPHDSESNDGRSVGYFQQQKGPNGELWWGTTASEMNLHSAATQFMTRLKAAGYNASNAQAANDSAQAIQRSGVPQAYKQWWDDINRLYDKVKGSGGGPAPAPKPPQSGPWTGDPVWLADVLRAEGLNVVELPGWLDRGHGDMGRLWGVVCHHTGSDNTPSSEIAFHPSLGLCSQIHLARNGTVTLCGVGIAWHAGVGSYPGLPEDNANAVTIGIEAQNSGTYDGAPHRTNWPDAQYDAYVKCCAAICRRLGVRADHVISHKEWAGRKQGKWDPGAIDMNIFRADVQRRIDAHQPNGEDDFMAALSADEQREVLNLLRVLADRRFVSRSPFRHLGEGPSETVAGFGLNTDGLNHAQYTIELARLGDPTHLALLREVASAEGDSRYPDRQYDAKLAKRVLAEIEGAATAPAKPSTPSAPTEPAPEAPTPPVKAACALSAAGCVVAGSTSGGGCALSTDGTGKCVVTAATDGGAA

SEQ ID NO: 239 - protein, 893 aa, Artificial Sequence
  90+24+104+14
TWLPAVIKIQAHWRGYRQRKIYLMVAAWTAVMRIRFASYALGVNGLPIKVDGYFGYDEEKVQKEYQRRTGQFPSGQVSREDLHRLGLLPTLISIHGTGQADPFGIGYPADIARRVLDLYWWQPLGNYPAKAVPMNGSVDQGEREGVRLISDPLIVPGPTAFVDYSQGSVIGGRLRNRMRRKELRGELVAAASFGNPMRLRGHYAGNVDPGGEGIDPRQELAAEPFRIELAAKGDLYTTCPGGQSGEMERAIYHAVFSKFIGEDTLIEQVWELAKNPFREVPAAVKAIVRGGMFAIRGTGPHVRYHIDQCPGTGMTYYEYAVKHLRDTADARLRRIVASVTAGAGAGMSFTRFLQDDPLLTREQVMAELIRVADELNMPDKRGACVIAGMTISQEVGVKDNDPPFERRFWCPANRADPESFNYPHDSESNDGRSVGYFQQQKGPNGELWWGTTASEMNLHSAATQFMTRLKAAGYNASNAQAANDSAQAIQRSGVPQAYKQWWDDINRLYDKVKGSGGGPAPAPKPPQSGPWTGDPVWLADVLRAEGLNVVELPGWLDRGHGDMGRLWGVVCHHTGSDNTPSSEIAFHPSLGLCSQIHLARNGTVTLCGVGIAWHAGVGSYPGLPEDNANAVTIGIEAQNSGTYDGAPHRTNWPDAQYDAYVKCCAAICRRLGVRADHVISHKEWAGRKQGKWDPGAIDMNIFRADVQRRIDAHQPNGEDDFMAALSADEQREVLNLLRVLADRRFVSRSPFRHLGEGPSETVAGFGLNTDGLNHAQYTIELARLGDPTHLALLREVASAEGDSRYPDRQYDAKLAKRVLAEIEGAATAPAKPSTPSAPTEPAPEAPTPPVKAACALSAAGCVVAGSTSGGGCALSTDGTGKCVVTAATDGGAA

SEQ ID NO: 240 - protein, 900 aa, Artificial Sequence
  36+32+110+14
KFFRKLKKSVKKRAKEFFKKPRVIGVSIPFMRRKFSYAATLADTEFYDEAMTAVVAEMQSRYNTAGQLRDGLYIPGIINAETKYVMGYLSRPVIDTRPVLFTVCGTGVPWWVGPDADTARAVEDQYLWQPIGYPAAPFPMGRSITAGITEAHNQANRWRERIETHGTALAGYSQGAVVLSELWMNHIAPEDGSLRWMKPHVRKAVTWGNPNRELGHVWADHGGSPMAPSNTQGVSSNGMRNTPDWWRDYAHQGDLYACTEPGDTQEVRNAIWQIVRDLDLFTGPDSLLAQVIELAQAPLPETIAITRAILDAGMFFAKRTGPHVDYNPQPAIDYLRTIPQGRSHPVQPYPGAFMSFTRFLQDDPLLTREQVMAELIRVADELNMPDKRGACVIAGMTISQEVGVKDNDPPFERRFWCPANRADPESFNYPHDSESNDGRSVGYFQQQKGPNGELWWGTTASEMNLHSAATQFMTRLKAAGYNASNAQAANDSAQAIQRSGVPQAYKQWWDDINRLYDKVKGSGGGPAPAPKPPQSGPWTGDPVWLADVLRAEGLNVVELPGWLDRGHGDMGRLWGVVCHHTGSDNTPSSEIAFHPSLGLCSQIHLARNGTVTLCGVGIAWHAGVGSYPGLPEDNANAVTIGIEAQNSGTYDGAPHRTNWPDAQYDAYVKCCAAICRRLGVRADHVISHKEWAGRKQGKWDPGAIDMNIFRADVQRRIDAHQPNGEDDFMAALSADEQREVLNLLRVLADRRFVSRSPFRHLGEGPSETVAGFGLNTDGLNHAQYTIELARLGDPTHLALLREVASAEGDSRYPDRQYDAKLAKRVLAEIEGAATAPAKPSTPSAPTEPAPEAPTPPVKAACALSAAGCVVAGSTSGGGCALSTDGTGKCVVTAATDGGAA

SEQ ID NO: 241 - protein, 896 aa, Artificial Sequence
  82+28+104+14
IWGLIAHGVGHVGRLIHGLIRGMPLRVGSNDANTGGLVSRWQKTMLARYAAYAKAYDGGPLRVDGYFGYDDADVQREYERRTHQVVDGEVSDADLRALGLEAAKRWLFTVHGTGQADPLGPGLPADTARAVLDKYTWQPIGNYPARAFPMWSSIMDGARELRSQIASKSGEVNLAGYSQGAVVVGQVLKHDIMDPKGSLHHRLGDVRKVVLWGNPMRQRGIAHFDEWIHPVAGPDSYGILDDRLEGLEKAPFEIRDYAHAGDMYASITDGDKDEYKIAICKIVMTATDFYRGPNSVVSQLIELGQRPLTEGIAMALAIIDTLRFFTNTAHGYNIGPAIDFLRSAGAGAGMSFTRFLQDDPLLTREQVMAELIRVADELNMPDKRGACVIAGMTISQEVGVKDNDPPFERRFWCPANRADPESFNYPHDSESNDGRSVGYFQQQKGPNGELWWGTTASEMNLHSAATQFMTRLKAAGYNASNAQAANDSAQAIQRSGVPQAYKQWWDDINRLYDKVKGSGGGPAPAPKPPQSGPWTGDPVWLADVLRAEGLNVVELPGWLDRGHGDMGRLWGVVCHHTGSDNTPSSEIAFHPSLGLCSQIHLARNGTVTLCGVGIAWHAGVGSYPGLPEDNANAVTIGIEAQNSGTYDGAPHRTNWPDAQYDAYVKCCAAICRRLGVRADHVISHKEWAGRKQGKWDPGAIDMNIFRADVQRRIDAHQPNGEDDFMAALSADEQREVLNLLRVLADRRFVSRSPFRHLGEGPSETVAGFGLNTDGLNHAQYTIELARLGDPTHLALLREVASAEGDSRYPDRQYDAKLAKRVLAEIEGAATAPAKPSTPSAPTEPAPEAPTPPVKAACALSAAGCVVAGSTSGGGCALSTDGTGKCVVTAATDGGAA

SEQ ID NO: 242 - protein, 747 aa, Artificial Sequence
  58+22+104+12
GIGKFLKKAKKFMTWIGWQQGMAGEPVAAAKRELRRKFSYAKHLDDSDVFDLELLAVLIEYQQKKNATGYTPRLREDGVLDWATQVAIGTVQTGPPPKAGTLFTVQGTGVDMWTGPPADTARAVEGDWEWQPIGNYPASPFPMWASIWQGIEELRFQIRRHATEKPGKAIALAGFSQGAVVVSWVYKWDIALPGGMLHDLLPQVAAGVTWGNPMAEKGKFHGNRFAGWPVPAGMGINRDRLENTPALWLDFGHGRNSPWGQDIYCDRPDNLAGQDMELICDLVMAQDLWRFVTDFAVKAGNVMASPETELPAILDAVTQAGMFFIVNRTAPHLTYDVGPAIDYLRQVARDRRLALAAAGAGAGMTTKDQVAQITIAEAKARGYTRSECLAIMSTFYQESGWNDTIWDPTHTTYGIAQQDGSYPHRFDGAAAQIKGFFDKLDVWRAKPGASTDIWLNICWMQQAPNWPSADYWYANGRRAYLTEIKSRIATVTPYLDKYWPADGGTAVPDEPRPDFNEFPIWSNNNSARSGKPTMFLIHTQEGGGGDAAAENLAKWFQNGNGVSYHYTISQASDGGVTVVDCVDTDRAAWSVGNANSISINLCFAGSRASWMRDQWMKQSNAIDVAAYLAVQDAKKYGFTPLVVPPPYTNGRPGISDHRWVTDVFKWGTHTDVGDWFPWDYFAERVNHWANGGKTEPEPPKVKRFPDDWSDREILVEILRQLRGYNLTGWPQLGGKTLVDAVAELLGH

SEQ ID NO: 243 - protein, 865 aa, Artificial Sequence
  44+20+108+2
FFHHIFRGKVHVGKTIHRLVTGMRRKFASYAGDLADTPLYDEAMTAAVAEMQARYSAAGQLRAGLYIPGIVGAETKYVMGYLPRPVVDTRPVLITVCGTGVPWWIGPDADTARAVEDKYLWQPIGYPAAPFPMGKSIAAAITETHNQANRWRERIETHGAALAGYSQGAVVVSELWMNHIAPEDGSLHWMKPHIEKAVTWGNPNRELGHVWADHGGSPRAPSNTQGVSSNGMRDTPPWWRDYAHQGDLYACTEPGDTQEVRNAIWQIVRDLDLFTGPDSLLAQVVELVQAPLPEAIAITKALLDAGMFFAKRTGPHVDYNVQPAIDYLRTVFNQRKEHKGYMLAMTERVLPYDRNIVPQETGWWCGPAATQVVLNSRGIIVPEATLANEIEQIENPGRGDDRDGTDYVGLIEQVLDRRVPEAKYTSVYMPNDPPTAAQREALWQNIVRSINAGWGVIMNWVAPPSNKPRGVKGSPNPKYSGGTTYHYVACMGYDDTPGARALWIADSGFQPFNYWISFDQAATLIPPKGYAYAATTATAPAPAPAPVDAAPILARAAGISEAKAREILPTFRDGLRLAECNNVPRIAMFIAQTGHESDNFNATQEYDHGRNYGDPNEATDRWKYKGRTWIQITWRGNYERFSRWCFDRKLVPTPTYFVDNPRALADVRWAGIGAAWYWTVERPSINRLCDERNLTEVTRLINGGTSWEAPTWMKHRKERYDRALAVGNDLLKLLDGEEEGFLSALTPKEQRELYDEIMKRGPSRSFLADDGRQIETLLGFIYNIDGNAWNIVNILGCLIGVPECVDDIRDVAENGVRKGSYAESNPWLAQFGQEFCKRLLPLAGKLSELLNAQEFKVTHNRIIEQ

SEQ ID NO: 244 - protein, 762 aa, Artificial Sequence
  66+20+110+10
GGLKKLGKKLEGAGKRVFNAAEKALPVVAGAKALRKMRRKFASYAGDLADTPLYDEAMTAAVAEMQARYSAAGQLRAGLYIPGIVGAETKYVMGYLPRPVVDTRPVLITVCGTGVPWWIGPDADTARAVEDKYLWQPIGYPAAPFPMGKSIAAAITETHNQANRWRERIETHGAALAGYSQGAVVVSELWMNHIAPEDGSLHWMKPHIEKAVTWGNPNRELGHVWADHGGSPRAPSNTQGVSSNGMRDTPPWWRDYAHQGDLYACTEPGDTQEVRNAIWQIVRDLDLFTGPDSLLAQVVELVQAPLPEAIAITKALLDAGMFFAKRTGPHVDYNVQPAIDYLRTIPQGRSHPVQPYPGAFMPVYAIQSGTVIYAGAASGYGGPDPAGWLVIDSDDAEGGGCLEYGHIVREVNRGDHVTAGQRIGHINPNNRTNGGVAPHLHVTDWPHAYGQGSRQNVMARLSGAREPEAQAAPTPTEQGTVVGDPVWLADVVRPTVAKFAEYPGWRNRGHGDFKDIRGVMVHHTGGPASAASIANGRPDLAGPLAQLHISRDGTVTVVAVGVAWHAGAGSYPWLPTNMGNWHLIGIECEWPYGEPGINERNAYTVRWRDPEIIALRNTCAAILLRLGLGVDRLIGHKDYAGRAQGKWDPGNMSMDWLRGEVRKDMDGFVFPGEDIVNVTPPPVPAPVPAPPATANVLLHRGMSGPNVVKLQTTLRRWYSKLAVDGDFGPHTEACVRDRQRIYGLDVDGIVGPLTAAKIGLVL

SEQ ID NO: 245 - protein, 663 aa, Artificial Sequence
  36+34+112+10
KFFRKLKKSVKKRAKEFFKKPRVIGVSIPFMTMAIVISLRKPARLAAFASAVLCAGAALATGPAPVASAEPCSDIEVVFARGTSEPAGIGRVGQALTDAIRNQVGGRTVSTYGVNYPATYDFLAAADGANDATNRIATLAEQCPSTRVVLGGYSQGAAVVDMLLGIPPLGNKVGNFGSAPPLPSNLMNNVAAVAVFGNPSAKFGIPVTSRFGGRAIDACSDGDPICSDGRNPFAHTHYESSPFIPQAAGLIAGLVPAVPPPMPVYAIQSGTVIYAGAASGYGGPDPAGWLVIDSDDAEGGGCLEYGHIVREVNRGDHVTAGQRIGHINPNNRTNGGVAPHLHVTDWPHAYGQGSRQNVMARLSGAREPEAQAAPTPTEQGTVVGDPVWLADVVRPTVAKFAEYPGWRNRGHGDFKDIRGVMVHHTGGPASAASIANGRPDLAGPLAQLHISRDGTVTVVAVGVAWHAGAGSYPWLPTNMGNWHLIGIECEWPYGEPGINERNAYTVRWRDPEIIALRNTCAAILLRLGLGVDRLIGHKDYAGRAQGKWDPGNMSMDWLRGEVRKDMDGFVFPGEDIVNVTPPPVPAPVPAPPATANVLLHRGMSGPNVVKLQTTLRRWYSKLAVDGDFGPHTEACVRDRQRIYGLDVDGIVGPLTAAKIGLVL

SEQ ID NO: 246 - protein, 814 aa, Artificial Sequence
  80+16+108+2
FFGWLIKGAIHAGKAIHGLIHRRRHMSKPWLFTVHGTGQPDPLGPGLPADTARDVLDIYRWQPIGNYPAAAFPMWPSVEKGVAELILQIELKLDADPYADFAMAGYSQGAIVVGQVLKHHILPPTGRLHRFLHRLKKVIFWGNPMRQKGFAHSDEWIHPVAAPDTLGILEDRLENLEQYGFEVRDYAHDGDMYASIKEDDLHEYEVAIGRIVMKASGFIGGRDSVVAQLIELGQRPITEGIALAGAIIDALTFFARSRMGDKWPHLYNRYPAVEFLRQIVFNQRKEHKGYMLAMTERVLPYDRNIVPQETGWWCGPAATQVVLNSRGIIVPEATLANEIEQIENPGRGDDRDGTDYVGLIEQVLDRRVPEAKYTSVYMPNDPPTAAQREALWQNIVRSINAGWGVIMNWVAPPSNKPRGVKGSPNPKYSGGTTYHYVACMGYDDTPGARALWIADSGFQPFNYWISFDQAATLIPPKGYAYAATTATAPAPAPAPVDAAPILARAAGISEAKAREILPTFRDGLRLAECNNVPRIAMFIAQTGHESDNFNATQEYDHGRNYGDPNEATDRWKYKGRTWIQITWRGNYERFSRWCFDRKLVPTPTYFVDNPRALADVRWAGIGAAWYWTVERPSINRLCDERNLTEVTRLINGGTSWEAPTWMKHRKERYDRALAVGNDLLKLLDGEEEGFLSALTPKEQRELYDEIMKRGPSRSFLADDGRQIETLLGFIYNIDGNAWNIVNILGCLIGVPECVDDIRDVAENGVRKGSYAESNPWLAQFGQEFCKRLLPLAGKLSELLNAQEFKVTHNRIIEQ

SEQ ID NO: 247 - protein, 886 aa, Artificial Sequence
  44+20+106+14
FFHHIFRGKVHVGKTIHRLVTGMRRKFASYAGDLADTPLYDEAMTAAVAEMQARYSAAGQLRAGLYIPGIVGAETKYVMGYLPRPVVDTRPVLITVCGTGVPWWIGPDADTARAVEDKYLWQPIGYPAAPFPMGKSIAAAITETHNQANRWRERIETHGAALAGYSQGAVVVSELWMNHIAPEDGSLHWMKPHIEKAVTWGNPNRELGHVWADHGGSPRAPSNTQGVSSNGMRDTPPWWRDYAHQGDLYACTEPGDTQEVRNAIWQIVRDLDLFTGPDSLLAQVVELVQAPLPEAIAITKALLDAGMFFAKRTGPHVDYNVQPAIDYLRTLSRFFHAELMSFTRFLQDDPLLTREQVMAELIRVADELNMPDKRGACVIAGMTISQEVGVKDNDPPFERRFWCPANRADPESFNYPHDSESNDGRSVGYFQQQKGPNGELWWGTTASEMNLHSAATQFMTRLKAAGYNASNAQAANDSAQAIQRSGVPQAYKQWWDDINRLYDKVKGSGGGPAPAPKPPQSGPWTGDPVWLADVLRAEGLNVVELPGWLDRGHGDMGRLWGVVCHHTGSDNTPSSEIAFHPSLGLCSQIHLARNGTVTLCGVGIAWHAGVGSYPGLPEDNANAVTIGIEAQNSGTYDGAPHRTNWPDAQYDAYVKCCAAICRRLGVRADHVISHKEWAGRKQGKWDPGAIDMNIFRADVQRRIDAHQPNGEDDFMAALSADEQREVLNLLRVLADRRFVSRSPFRHLGEGPSETVAGFGLNTDGLNHAQYTIELARLGDPTHLALLREVASAEGDSRYPDRQYDAKLAKRVLAEIEGAATAPAKPSTPSAPTEPAPEAPTPPVKAACALSAAGCVVAGSTSGGGCALSTDGTGKCVVTAATDGGAA

SEQ ID NO: 248 - protein, 898 aa, Artificial Sequence
  74+28+112+14
GIKDWIKGAAKKLIKTVASHIANQMPLRVGSNDANTGGLVSRWQKTMLARYAAYAKAYDGGPLRVDGYFGYDDADVQREYERRTHQVVDGEVSDADLRALGLEAAKRWLFTVHGTGQADPLGPGLPADTARAVLDKYTWQPIGNYPARAFPMWSSIMDGARELRSQIASKSGEVNLAGYSQGAVVVGQVLKHDIMDPKGSLHHRLGDVRKVVLWGNPMRQRGIAHFDEWIHPVAGPDSYGILDDRLEGLEKAPFEIRDYAHAGDMYASITDGDKDEYKIAICKIVMTATDFYRGPNSVVSQLIELGQRPLTEGIAMALAIIDTLRFFTNTAHGYNIGPAIDFLRSPAVPPPMSFTRFLQDDPLLTREQVMAELIRVADELNMPDKRGACVIAGMTISQEVGVKDNDPPFERRFWCPANRADPESFNYPHDSESNDGRSVGYFQQQKGPNGELWWGTTASEMNLHSAATQFMTRLKAAGYNASNAQAANDSAQAIQRSGVPQAYKQWWDDINRLYDKVKGSGGGPAPAPKPPQSGPWTGDPVWLADVLRAEGLNVVELPGWLDRGHGDMGRLWGVVCHHTGSDNTPSSEIAFHPSLGLCSQIHLARNGTVTLCGVGIAWHAGVGSYPGLPEDNANAVTIGIEAQNSGTYDGAPHRTNWPDAQYDAYVKCCAAICRRLGVRADHVISHKEWAGRKQGKWDPGAIDMNIFRADVQRRIDAHQPNGEDDFMAALSADEQREVLNLLRVLADRRFVSRSPFRHLGEGPSETVAGFGLNTDGLNHAQYTIELARLGDPTHLALLREVASAEGDSRYPDRQYDAKLAKRVLAEIEGAATAPAKPSTPSAPTEPAPEAPTPPVKAACALSAAGCVVAGSTSGGGCALSTDGTGKCVVTAATDGGAA

SEQ ID NO: 249 - protein, 746 aa, Artificial Sequence
  36+20+112+10
KFFRKLKKSVKKRAKEFFKKPRVIGVSIPFMRRKFASYAGDLADTPLYDEAMTAAVAEMQARYSAAGQLRAGLYIPGIVGAETKYVMGYLPRPVVDTRPVLITVCGTGVPWWIGPDADTARAVEDKYLWQPIGYPAAPFPMGKSIAAAITETHNQANRWRERIETHGAALAGYSQGAVVVSELWMNHIAPEDGSLHWMKPHIEKAVTWGNPNRELGHVWADHGGSPRAPSNTQGVSSNGMRDTPPWWRDYAHQGDLYACTEPGDTQEVRNAIWQIVRDLDLFTGPDSLLAQVVELVQAPLPEAIAITKALLDAGMFFAKRTGPHVDYNVQPAIDYLRTPAVPPPMPVYAIQSGTVIYAGAASGYGGPDPAGWLVIDSDDAEGGGCLEYGHIVREVNRGDHVTAGQRIGHINPNNRTNGGVAPHLHVTDWPHAYGQGSRQNVMARLSGAREPEAQAAPTPTEQGTVVGDPVWLADVVRPTVAKFAEYPGWRNRGHGDFKDIRGVMVHHTGGPASAASIANGRPDLAGPLAQLHISRDGTVTVVAVGVAWHAGAGSYPWLPTNMGNWHLIGIECEWPYGEPGINERNAYTVRWRDPEIIALRNTCAAILLRLGLGVDRLIGHKDYAGRAQGKWDPGNMSMDWLRGEVRKDMDGFVFPGEDIVNVTPPPVPAPVPAPPATANVLLHRGMSGPNVVKLQTTLRRWYSKLAVDGDFGPHTEACVRDRQRIYGLDVDGIVGPLTAAKIGLVL

SEQ ID NO: 250 - protein, 669 aa, Artificial Sequence
  38+26+112+10
WRSLGRTLLRLSHALKPLARRSGWMWSGYPADLARRVEDLYYFQPIYYGPGGIPATVPMGASAQSGVDMGVRLVLECEARPSRDVPDGYALCGYSQGGMVVSALLDEFRTGRLRHLNGKLMAGSTFGNPWRELDSNGGRGISDRRIVGTPDFWVDEFDPGDIYANVPNNDVGDDMTAIFKLVQLRSLADLIGIGSIMDRVMDVLRGPLSGMRSVVEAIVRGLLFFGRKPPTAPHTEYHLREVRPGVTYFEHAVAHMRAMAAPAVPPPMPVYAIQSGTVIYAGAASGYGGPDPAGWLVIDSDDAEGGGCLEYGHIVREVNRGDHVTAGQRIGHINPNNRTNGGVAPHLHVTDWPHAYGQGSRQNVMARLSGAREPEAQAAPTPTEQGTVVGDPVWLADVVRPTVAKFAEYPGWRNRGHGDFKDIRGVMVHHTGGPASAASIANGRPDLAGPLAQLHISRDGTVTVVAVGVAWHAGAGSYPWLPTNMGNWHLIGIECEWPYGEPGINERNAYTVRWRDPEIIALRNTCAAILLRLGLGVDRLIGHKDYAGRAQGKWDPGNMSMDWLRGEVRKDMDGFVFPGEDIVNVTPPPVPAPVPAPPATANVLLHRGMSGPNVVKLQTTLRRWYSKLAVDGDFGPHTEACVRDRQRIYGLDVDGIVGPLTAAKIGLVL

SEQ ID NO: 251 - protein, 821 aa, Artificial Sequence
  36+20+112+4
KFFRKLKKSVKKRAKEFFKKPRVIGVSIPFMRRKFASYAGDLADTPLYDEAMTAAVAEMQARYSAAGQLRAGLYIPGIVGAETKYVMGYLPRPVVDTRPVLITVCGTGVPWWIGPDADTARAVEDKYLWQPIGYPAAPFPMGKSIAAAITETHNQANRWRERIETHGAALAGYSQGAVVVSELWMNHIAPEDGSLHWMKPHIEKAVTWGNPNRELGHVWADHGGSPRAPSNTQGVSSNGMRDTPPWWRDYAHQGDLYACTEPGDTQEVRNAIWQIVRDLDLFTGPDSLLAQVVELVQAPLPEAIAITKALLDAGMFFAKRTGPHVDYNVQPAIDYLRTPAVPPPMPRVVYGLTHSSNGWPMLNSDECEWTKIPGTSVTLQIAKGQPLAILRAFAADFHAYVEPLRDADSACWTPTNSVPSSNHLSGTAMDLNWNTHPFQVPDAGFDAAKKARVKELLDFYEGMVFWGNDWSSPKDAMHFQLASLRNGGTFDTYGNPKTADFIARKIRADGYSTFRRGSAPASAAPILAAATGLSEARAAEILPAVRSGLRESECTNVNRIAMWLAQIGHESGSFQYTEEIAKNGRYAPYIGRTWIQITWDYNYRSFSQWAYAFGMVPTPDYFVVNYRELADLKWAGIGPAWYWTVARPDINELSDRRDLNTVTRRINGGTNGLADRQARYNRALAQGDALLQLLHEEDDFLSALTDAEQRELLDLARQQAKYKRKSRSPLHWPHEGEVDTIAGLSWSTDANVHIQLVEKLAVIYGDPVSIALLYAVSNSDDPTNNPELAKRILKRVKPEDITAAQVQIQKWLAAEQKFHAA

SEQ ID NO: 252 - protein, 858 aa, Artificial Sequence
  52+20+108+2
FKCRRWQWRMKKLGAMRRKFASYAGDLADTPLYDEAMTAAVAEMQARYSAAGQLRAGLYIPGIVGAETKYVMGYLPRPVVDTRPVLITVCGTGVPWWIGPDADTARAVEDKYLWQPIGYPAAPFPMGKSIAAAITETHNQANRWRERIETHGAALAGYSQGAVVVSELWMNHIAPEDGSLHWMKPHIEKAVTWGNPNRELGHVWADHGGSPRAPSNTQGVSSNGMRDTPPWWRDYAHQGDLYACTEPGDTQEVRNAIWQIVRDLDLFTGPDSLLAQVVELVQAPLPEAIAITKALLDAGMFFAKRTGPHVDYNVQPAIDYLRTVFNQRKEHKGYMLAMTERVLPYDRNIVPQETGWWCGPAATQVVLNSRGIIVPEATLANEIEQIENPGRGDDRDGTDYVGLIEQVLDRRVPEAKYTSVYMPNDPPTAAQREALWQNIVRSINAGWGVIMNWVAPPSNKPRGVKGSPNPKYSGGTTYHYVACMGYDDTPGARALWIADSGFQPFNYWISFDQAATLIPPKGYAYAATTATAPAPAPAPVDAAPILARAAGISEAKAREILPTFRDGLRLAECNNVPRIAMFIAQTGHESDNFNATQEYDHGRNYGDPNEATDRWKYKGRTWIQITWRGNYERFSRWCFDRKLVPTPTYFVDNPRALADVRWAGIGAAWYWTVERPSINRLCDERNLTEVTRLINGGTSWEAPTWMKHRKERYDRALAVGNDLLKLLDGEEEGFLSALTPKEQRELYDEIMKRGPSRSFLADDGRQIETLLGFIYNIDGNAWNIVNILGCLIGVPECVDDIRDVAENGVRKGSYAESNPWLAQFGQEFCKRLLPLAGKLSELLNAQEFKVTHNRIIEQ

SEQ ID NO: 253 - protein, 755 aa, Artificial Sequence
  36+24+112+10
KFFRKLKKSVKKRAKEFFKKPRVIGVSIPFMVAAWTAVMRIRFASYALGVNGLPIKVDGYFGYDEEKVQKEYQRRTGQFPSGQVSREDLHRLGLLPTLISIHGTGQADPFGIGYPADIARRVLDLYWWQPLGNYPAKAVPMNGSVDQGEREGVRLISDPLIVPGPTAFVDYSQGSVIGGRLRNRMRRKELRGELVAAASFGNPMRLRGHYAGNVDPGGEGIDPRQELAAEPFRIELAAKGDLYTTCPGGQSGEMERAIYHAVFSKFIGEDTLIEQVWELAKNPFREVPAAVKAIVRGGMFAIRGTGPHVRYHIDQCPGTGMTYYEYAVKHLRDTADARLRRIVASVTPAVPPPMPVYAIQSGTVIYAGAASGYGGPDPAGWLVIDSDDAEGGGCLEYGHIVREVNRGDHVTAGQRIGHINPNNRTNGGVAPHLHVTDWPHAYGQGSRQNVMARLSGAREPEAQAAPTPTEQGTVVGDPVWLADVVRPTVAKFAEYPGWRNRGHGDFKDIRGVMVHHTGGPASAASIANGRPDLAGPLAQLHISRDGTVTVVAVGVAWHAGAGSYPWLPTNMGNWHLIGIECEWPYGEPGINERNAYTVRWRDPEIIALRNTCAAILLRLGLGVDRLIGHKDYAGRAQGKWDPGNMSMDWLRGEVRKDMDGFVFPGEDIVNVTPPPVPAPVPAPPATANVLLHRGMSGPNVVKLQTTLRRWYSKLAVDGDFGPHTEACVRDRQRIYGLDVDGIVGPLTAAKIGLVL

SEQ ID NO: 254 - protein, 869 aa, Artificial Sequence
  38+20+110+2
WRSLGRTLLRLSHALKPLARRSGWMRRKFASYAGDLADTPLYDEAMTAAVAEMQARYSAAGQLRAGLYIPGIVGAETKYVMGYLPRPVVDTRPVLITVCGTGVPWWIGPDADTARAVEDKYLWQPIGYPAAPFPMGKSIAAAITETHNQANRWRERIETHGAALAGYSQGAVVVSELWMNHIAPEDGSLHWMKPHIEKAVTWGNPNRELGHVWADHGGSPRAPSNTQGVSSNGMRDTPPWWRDYAHQGDLYACTEPGDTQEVRNAIWQIVRDLDLFTGPDSLLAQVVELVQAPLPEAIAITKALLDAGMFFAKRTGPHVDYNVQPAIDYLRTIPQGRSHPVQPYPGAFMTERVLPYDRNIVPQETGWWCGPAATQVVLNSRGIIVPEATLANEIEQIENPGRGDDRDGTDYVGLIEQVLDRRVPEAKYTSVYMPNDPPTAAQREALWQNIVRSINAGWGVIMNWVAPPSNKPRGVKGSPNPKYSGGTTYHYVACMGYDDTPGARALWIADSGFQPFNYWISFDQAATLIPPKGYAYAATTATAPAPAPAPVDAAPILARAAGISEAKAREILPTFRDGLRLAECNNVPRIAMFIAQTGHESDNFNATQEYDHGRNYGDPNEATDRWKYKGRTWIQITWRGNYERFSRWCFDRKLVPTPTYFVDNPRALADVRWAGIGAAWYWTVERPSINRLCDERNLTEVTRLINGGTSWEAPTWMKHRKERYDRALAVGNDLLKLLDGEEEGFLSALTPKEQRELYDEIMKRGPSRSFLADDGRQIETLLGFIYNIDGNAWNIVNILGCLIGVPECVDDIRDVAENGVRKGSYAESNPWLAQFGQEFCKRLLPLAGKLSELLNAQEFKVTHNRIIEQ

SEQ ID NO: 255 - protein, 892 aa, Artificial Sequence
  42+20+110+14
GLLSKVLGVGKKVLCGVSGLCMRRKFASYAGDLADTPLYDEAMTAAVAEMQARYSAAGQLRAGLYIPGIVGAETKYVMGYLPRPVVDTRPVLITVCGTGVPWWIGPDADTARAVEDKYLWQPIGYPAAPFPMGKSIAAAITETHNQANRWRERIETHGAALAGYSQGAVVVSELWMNHIAPEDGSLHWMKPHIEKAVTWGNPNRELGHVWADHGGSPRAPSNTQGVSSNGMRDTPPWWRDYAHQGDLYACTEPGDTQEVRNAIWQIVRDLDLFTGPDSLLAQVVELVQAPLPEAIAITKALLDAGMFFAKRTGPHVDYNVQPAIDYLRTIPQGRSHPVQPYPGAFMSFTRFLQDDPLLTREQVMAELIRVADELNMPDKRGACVIAGMTISQEVGVKDNDPPFERRFWCPANRADPESFNYPHDSESNDGRSVGYFQQQKGPNGELWWGTTASEMNLHSAATQFMTRLKAAGYNASNAQAANDSAQAIQRSGVPQAYKQWWDDINRLYDKVKGSGGGPAPAPKPPQSGPWTGDPVWLADVLRAEGLNVVELPGWLDRGHGDMGRLWGVVCHHTGSDNTPSSEIAFHPSLGLCSQIHLARNGTVTLCGVGIAWHAGVGSYPGLPEDNANAVTIGIEAQNSGTYDGAPHRTNWPDAQYDAYVKCCAAICRRLGVRADHVISHKEWAGRKQGKWDPGAIDMNIFRADVQRRIDAHQPNGEDDFMAALSADEQREVLNLLRVLADRRFVSRSPFRHLGEGPSETVAGFGLNTDGLNHAQYTIELARLGDPTHLALLREVASAEGDSRYPDRQYDAKLAKRVLAEIEGAATAPAKPSTPSAPTEPAPEAPTPPVKAACALSAAGCVVAGSTSGGGCALSTDGTGKCVVTAATDGGAA

SEQ ID NO: 256 - protein, 832 aa, Artificial Sequence
  78+16+104+14
FIFHIIKGLFHAGKMIHGLVTRRRHMSKPWLFTVHGTGQPDPLGPGLPADTARDVLDIYRWQPIGNYPAAAFPMWPSVEKGVAELILQIELKLDADPYADFAMAGYSQGAIVVGQVLKHHILPPTGRLHRFLHRLKKVIFWGNPMRQKGFAHSDEWIHPVAAPDTLGILEDRLENLEQYGFEVRDYAHDGDMYASIKEDDLHEYEVAIGRIVMKASGFIGGRDSVVAQLIELGQRPITEGIALAGAIIDALTFFARSRMGDKWPHLYNRYPAVEFLRQIAGAGAGMSFTRFLQDDPLLTREQVMAELIRVADELNMPDKRGACVIAGMTISQEVGVKDNDPPFERRFWCPANRADPESFNYPHDSESNDGRSVGYFQQQKGPNGELWWGTTASEMNLHSAATQFMTRLKAAGYNASNAQAANDSAQAIQRSGVPQAYKQWWDDINRLYDKVKGSGGGPAPAPKPPQSGPWTGDPVWLADVLRAEGLNVVELPGWLDRGHGDMGRLWGVVCHHTGSDNTPSSEIAFHPSLGLCSQIHLARNGTVTLCGVGIAWHAGVGSYPGLPEDNANAVTIGIEAQNSGTYDGAPHRTNWPDAQYDAYVKCCAAICRRLGVRADHVISHKEWAGRKQGKWDPGAIDMNIFRADVQRRIDAHQPNGEDDFMAALSADEQREVLNLLRVLADRRFVSRSPFRHLGEGPSETVAGFGLNTDGLNHAQYTIELARLGDPTHLALLREVASAEGDSRYPDRQYDAKLAKRVLAEIEGAATAPAKPSTPSAPTEPAPEAPTPPVKAACALSAAGCVVAGSTSGGGCALSTDGTGKCVVTAATDGGAA

SEQ ID NO: 257 - protein, 896 aa, Artificial Sequence
  38+22+112+2
WRSLGRTLLRLSHALKPLARRSGWMTWIGWQQGMAGEPVAAAKRELRRKFSYAKHLDDSDVFDLELLAVLIEYQQKKNATGYTPRLREDGVLDWATQVAIGTVQTGPPPKAGTLFTVQGTGVDMWTGPPADTARAVEGDWEWQPIGNYPASPFPMWASIWQGIEELRFQIRRHATEKPGKAIALAGFSQGAVVVSWVYKWDIALPGGMLHDLLPQVAAGVTWGNPMAEKGKFHGNRFAGWPVPAGMGINRDRLENTPALWLDFGHGRNSPWGQDIYCDRPDNLAGQDMELICDLVMAQDLWRFVTDFAVKAGNVMASPETELPAILDAVTQAGMFFIVNRTAPHLTYDVGPAIDYLRQVARDRRLALAAPAVPPPMTERVLPYDRNIVPQETGWWCGPAATQVVLNSRGIIVPEATLANEIEQIENPGRGDDRDGTDYVGLIEQVLDRRVPEAKYTSVYMPNDPPTAAQREALWQNIVRSINAGWGVIMNWVAPPSNKPRGVKGSPNPKYSGGTTYHYVACMGYDDTPGARALWIADSGFQPFNYWISFDQAATLIPPKGYAYAATTATAPAPAPAPVDAAPILARAAGISEAKAREILPTFRDGLRLAECNNVPRIAMFIAQTGHESDNFNATQEYDHGRNYGDPNEATDRWKYKGRTWIQITWRGNYERFSRWCFDRKLVPTPTYFVDNPRALADVRWAGIGAAWYWTVERPSINRLCDERNLTEVTRLINGGTSWEAPTWMKHRKERYDRALAVGNDLLKLLDGEEEGFLSALTPKEQRELYDEIMKRGPSRSFLADDGRQIETLLGFIYNIDGNAWNIVNILGCLIGVPECVDDIRDVAENGVRKGSYAESNPWLAQFGQEFCKRLLPLAGKLSELLNAQEFKVTHNRIIEQ

SEQ ID NO: 258 - protein, 810 aa, Artificial Sequence
  38+34+108+14
WRSLGRTLLRLSHALKPLARRSGWMTMAIVISLRKPARLAAFASAVLCAGAALATGPAPVASAEPCSDIEVVFARGTSEPAGIGRVGQALTDAIRNQVGGRTVSTYGVNYPATYDFLAAADGANDATNRIATLAEQCPSTRVVLGGYSQGAAVVDMLLGIPPLGNKVGNFGSAPPLPSNLMNNVAAVAVFGNPSAKFGIPVTSRFGGRAIDACSDGDPICSDGRNPFAHTHYESSPFIPQAAGLIAGLVVFNQRKEHKGYMLAMSFTRFLQDDPLLTREQVMAELIRVADELNMPDKRGACVIAGMTISQEVGVKDNDPPFERRFWCPANRADPESFNYPHDSESNDGRSVGYFQQQKGPNGELWWGTTASEMNLHSAATQFMTRLKAAGYNASNAQAANDSAQAIQRSGVPQAYKQWWDDINRLYDKVKGSGGGPAPAPKPPQSGPWTGDPVWLADVLRAEGLNVVELPGWLDRGHGDMGRLWGVVCHHTGSDNTPSSEIAFHPSLGLCSQIHLARNGTVTLCGVGIAWHAGVGSYPGLPEDNANAVTIGIEAQNSGTYDGAPHRTNWPDAQYDAYVKCCAAICRRLGVRADHVISHKEWAGRKQGKWDPGAIDMNIFRADVQRRIDAHQPNGEDDFMAALSADEQREVLNLLRVLADRRFVSRSPFRHLGEGPSETVAGFGLNTDGLNHAQYTIELARLGDPTHLALLREVASAEGDSRYPDRQYDAKLAKRVLAEIEGAATAPAKPSTPSAPTEPAPEAPTPPVKAACALSAAGCVVAGSTSGGGCALSTDGTGKCVVTAATDGGAA

SEQ ID NO: 259 - protein, 675 aa, Artificial Sequence
  36+26+104+10
KFFRKLKKSVKKRAKEFFKKPRVIGVSIPFMWSGYPADLARRVEDLYYFQPIYYGPGGIPATVPMGASAQSGVDMGVRLVLECEARPSRDVPDGYALCGYSQGGMVVSALLDEFRTGRLRHLNGKLMAGSTFGNPWRELDSNGGRGISDRRIVGTPDFWVDEFDPGDIYANVPNNDVGDDMTAIFKLVQLRSLADLIGIGSIMDRVMDVLRGPLSGMRSVVEAIVRGLLFFGRKPPTAPHTEYHLREVRPGVTYFEHAVAHMRAMAAAGAGAGMPVYAIQSGTVIYAGAASGYGGPDPAGWLVIDSDDAEGGGCLEYGHIVREVNRGDHVTAGQRIGHINPNNRTNGGVAPHLHVTDWPHAYGQGSRQNVMARLSGAREPEAQAAPTPTEQGTVVGDPVWLADVVRPTVAKFAEYPGWRNRGHGDFKDIRGVMVHHTGGPASAASIANGRPDLAGPLAQLHISRDGTVTVVAVGVAWHAGAGSYPWLPTNMGNWHLIGIECEWPYGEPGINERNAYTVRWRDPEIIALRNTCAAILLRLGLGVDRLIGHKDYAGRAQGKWDPGNMSMDWLRGEVRKDMDGFVFPGEDIVNVTPPPVPAPVPAPPATANVLLHRGMSGPNVVKLQTTLRRWYSKLAVDGDFGPHTEACVRDRQRIYGLDVDGIVGPLTAAKIGLVL

SEQ ID NO: 260 - protein, 829 aa, Artificial Sequence
  86+30+104+14
RPWAGNGSVHRYTVLSPRLKTQMSKPWLFTVHGTGQPDPLGPGLPADTARDVLDIYRWQPIGNYPAAAFPMWPSVEKGVAELILQIELKLDADPYADFALAGYSQGAIVVGQVLKHHIINPRGRLHRFLHRLRKVIFWGNPMRQKGFAHTDEWIHQVAASDTMGILEDRLENLEQYGFEVRDYAHDGDMYASIKEDDMHEYEVAIGRIVMSARRFIGGKDSVIAQLIELGQRPIWEGIAMARAIIDALTFFAKSTQGPSWPHLYNRFPAVEFLRRIAGAGAGMSFTRFLQDDPLLTREQVMAELIRVADELNMPDKRGACVIAGMTISQEVGVKDNDPPFERRFWCPANRADPESFNYPHDSESNDGRSVGYFQQQKGPNGELWWGTTASEMNLHSAATQFMTRLKAAGYNASNAQAANDSAQAIQRSGVPQAYKQWWDDINRLYDKVKGSGGGPAPAPKPPQSGPWTGDPVWLADVLRAEGLNVVELPGWLDRGHGDMGRLWGVVCHHTGSDNTPSSEIAFHPSLGLCSQIHLARNGTVTLCGVGIAWHAGVGSYPGLPEDNANAVTIGIEAQNSGTYDGAPHRTNWPDAQYDAYVKCCAAICRRLGVRADHVISHKEWAGRKQGKWDPGAIDMNIFRADVQRRIDAHQPNGEDDFMAALSADEQREVLNLLRVLADRRFVSRSPFRHLGEGPSETVAGFGLNTDGLNHAQYTIELARLGDPTHLALLREVASAEGDSRYPDRQYDAKLAKRVLAEIEGAATAPAKPSTPSAPTEPAPEAPTPPVKAACALSAAGCVVAGSTSGGGCALSTDGTGKCVVTAATDGGAA

SEQ ID NO: 261 - protein, 769 aa, Artificial Sequence
  36+26+106+6
KFFRKLKKSVKKRAKEFFKKPRVIGVSIPFMWSGYPADLARRVEDLYYFQPIYYGPGGIPATVPMGASAQSGVDMGVRLVLECEARPSRDVPDGYALCGYSQGGMVVSALLDEFRTGRLRHLNGKLMAGSTFGNPWRELDSNGGRGISDRRIVGTPDFWVDEFDPGDIYANVPNNDVGDDMTAIFKLVQLRSLADLIGIGSIMDRVMDVLRGPLSGMRSVVEAIVRGLLFFGRKPPTAPHTEYHLREVRPGVTYFEHAVAHMRAMAALSRFFHAELMTLIVTRDHAQWVHDMCRARAGNRYGYGGAFTLNPRDTTDCSGLVLQTAAWYGGRKDWIGNRYGSTESFRLDHKIVYDLGFRRLPPGGVAALGFTPVMLVGLQHGGGGRYSHTACTLMTMDIPGGPVKVSQRGVDWESRGEVNGVGVFLYDGARAWNDPLFHDFWYLDAKLEDGPTQSVDAAEILARATGLAYNRAVALLPAVRDGLIQADCTNPNRIAMWLAQIGHESDDFKATAEYASGDAYDTRTDLGNTPEVDGDGRLYKGRSWIMITGKDNYRDFSRWAHGRGLVPTPDYFVVHPLELSELRWAGIGAAWYWTVERPDINALSDRRDLETVTRRINGGLTNLDDRRRRYNLALAVGDQLLTLIGDDDELADPTIQRFIREIHGALFNTVVTQSPYGDPQNPDGSEPRSNLWQLHELIKNGDGMGHARYVEESARAGDLRELERVVRAAKGLGRDRSPEFIARARNVLAQIEAANPEYLQAYIARNGAL

SEQ ID NO: 262 - protein, 758 aa, Artificial Sequence
  40+26+110+8
FLGGLIKIVPAMICAVTKKCMWSGYPADLARRVEDLYYFQPIYYGPGGIPATVPMGASAQSGVDMGVRLVLECEARPSRDVPDGYALCGYSQGGMVVSALLDEFRTGRLRHLNGKLMAGSTFGNPWRELDSNGGRGISDRRIVGTPDFWVDEFDPGDIYANVPNNDVGDDMTAIFKLVQLRSLADLIGIGSIMDRVMDVLRGPLSGMRSVVEAIVRGLLFFGRKPPTAPHTEYHLREVRPGVTYFEHAVAHMRAMAAIPQGRSHPVQPYPGAFMLTVESFAAAMGNSLSVDRYRQLFPAAVESMVACGCTTVNRAAMWLAQVGHESGGLRWMEELASGAAYEWRSDLGNTQAGDGVRFKGRGPIQITGRYNYRKVSEWAHAQGIVPTPTYFVDNPTQLASDQYGFIGVSWYWQHGGPRPGQINGFADAGDILSGSRCVNGWVTTPNGMPDRTERWNRCRAMGDQILPAGAGTDNGGDGMAWTGDPVWLEDVLRPVLGDRLRVLPSWQMYGHGDFKDIRGVMVHHTGNARETAESIRKGRPDLRGPLSNIHIAPDGTVTLVAAGVCWHAGAGSYPWLPTNNANWHMIGIECAWPTIRPNGTYDEREPWPDAQIIAMRDTCAALTKRLGWDASRVIGHKEYAGASQGKWDPGNLDMGWFRGEVAKAMRGEFDPKAPAPAPNPPADNDNGGFLMALNDKQQHDLYNAVMTIAAVAADIQTQLRGPGLRGWPQLGRNANGEALTLVDAVGVIKAIADREAGR

SEQ ID NO: 263 - protein, 759 aa, Artificial Sequence
  36+28+112+10
KFFRKLKKSVKKRAKEFFKKPRVIGVSIPFMPLRVGSNDANTGGLVSRWQKTMLARYAAYAKAYDGGPLRVDGYFGYDDADVQREYERRTHQVVDGEVSDADLRALGLEAAKRWLFTVHGTGQADPLGPGLPADTARAVLDKYTWQPIGNYPARAFPMWSSIMDGARELRSQIASKSGEVNLAGYSQGAVVVGQVLKHDIMDPKGSLHHRLGDVRKVVLWGNPMRQRGIAHFDEWIHPVAGPDSYGILDDRLEGLEKAPFEIRDYAHAGDMYASITDGDKDEYKIAICKIVMTATDFYRGPNSVVSQLIELGQRPLTEGIAMALAIIDTLRFFTNTAHGYNIGPAIDFLRSPAVPPPMPVYAIQSGTVIYAGAASGYGGPDPAGWLVIDSDDAEGGGCLEYGHIVREVNRGDHVTAGQRIGHINPNNRTNGGVAPHLHVTDWPHAYGQGSRQNVMARLSGAREPEAQAAPTPTEQGTVVGDPVWLADVVRPTVAKFAEYPGWRNRGHGDFKDIRGVMVHHTGGPASAASIANGRPDLAGPLAQLHISRDGTVTVVAVGVAWHAGAGSYPWLPTNMGNWHLIGIECEWPYGEPGINERNAYTVRWRDPEIIALRNTCAAILLRLGLGVDRLIGHKDYAGRAQGKWDPGNMSMDWLRGEVRKDMDGFVFPGEDIVNVTPPPVPAPVPAPPATANVLLHRGMSGPNVVKLQTTLRRWYSKLAVDGDFGPHTEACVRDRQRIYGLDVDGIVGPLTAAKIGLVL

SEQ ID NO: 264 - protein, 891 aa, Artificial Sequence
  36+20+104+14
KFFRKLKKSVKKRAKEFFKKPRVIGVSIPFMRRKFASYAGDLADTPLYDEAMTAAVAEMQARYSAAGQLRAGLYIPGIVGAETKYVMGYLPRPVVDTRPVLITVCGTGVPWWIGPDADTARAVEDKYLWQPIGYPAAPFPMGKSIAAAITETHNQANRWRERIETHGAALAGYSQGAVVVSELWMNHIAPEDGSLHWMKPHIEKAVTWGNPNRELGHVWADHGGSPRAPSNTQGVSSNGMRDTPPWWRDYAHQGDLYACTEPGDTQEVRNAIWQIVRDLDLFTGPDSLLAQVVELVQAPLPEAIAITKALLDAGMFFAKRTGPHVDYNVQPAIDYLRTAGAGAGMSFTRFLQDDPLLTREQVMAELIRVADELNMPDKRGACVIAGMTISQEVGVKDNDPPFERRFWCPANRADPESFNYPHDSESNDGRSVGYFQQQKGPNGELWWGTTASEMNLHSAATQFMTRLKAAGYNASNAQAANDSAQAIQRSGVPQAYKQWWDDINRLYDKVKGSGGGPAPAPKPPQSGPWTGDPVWLADVLRAEGLNVVELPGWLDRGHGDMGRLWGVVCHHTGSDNTPSSEIAFHPSLGLCSQIHLARNGTVTLCGVGIAWHAGVGSYPGLPEDNANAVTIGIEAQNSGTYDGAPHRTNWPDAQYDAYVKCCAAICRRLGVRADHVISHKEWAGRKQGKWDPGAIDMNIFRADVQRRIDAHQPNGEDDFMAALSADEQREVLNLLRVLADRRFVSRSPFRHLGEGPSETVAGFGLNTDGLNHAQYTIELARLGDPTHLALLREVASAEGDSRYPDRQYDAKLAKRVLAEIEGAATAPAKPSTPSAPTEPAPEAPTPPVKAACALSAAGCVVAGSTSGGGCALSTDGTGKCVVTAATDGGAA

SEQ ID NO: 265 - protein, 741 aa, Artificial Sequence
  78+20+104+10
FIFHIIKGLFHAGKMIHGLVTRRRHMRRKFASYAGDLADTPLYDEAMTAAVAEMQARYSAAGQLRAGLYIPGIVGAETKYVMGYLPRPVVDTRPVLITVCGTGVPWWIGPDADTARAVEDKYLWQPIGYPAAPFPMGKSIAAAITETHNQANRWRERIETHGAALAGYSQGAVVVSELWMNHIAPEDGSLHWMKPHIEKAVTWGNPNRELGHVWADHGGSPRAPSNTQGVSSNGMRDTPPWWRDYAHQGDLYACTEPGDTQEVRNAIWQIVRDLDLFTGPDSLLAQVVELVQAPLPEAIAITKALLDAGMFFAKRTGPHVDYNVQPAIDYLRTAGAGAGMPVYAIQSGTVIYAGAASGYGGPDPAGWLVIDSDDAEGGGCLEYGHIVREVNRGDHVTAGQRIGHINPNNRTNGGVAPHLHVTDWPHAYGQGSRQNVMARLSGAREPEAQAAPTPTEQGTVVGDPVWLADVVRPTVAKFAEYPGWRNRGHGDFKDIRGVMVHHTGGPASAASIANGRPDLAGPLAQLHISRDGTVTVVAVGVAWHAGAGSYPWLPTNMGNWHLIGIECEWPYGEPGINERNAYTVRWRDPEIIALRNTCAAILLRLGLGVDRLIGHKDYAGRAQGKWDPGNMSMDWLRGEVRKDMDGFVFPGEDIVNVTPPPVPAPVPAPPATANVLLHRGMSGPNVVKLQTTLRRWYSKLAVDGDFGPHTEACVRDRQRIYGLDVDGIVGPLTAAKIGLVL

SEQ ID NO: 266 - protein, 889 aa, Artificial Sequence
  52+14+104+28
FKCRRWQWRMKKLGAMSFTRFLQDDPLLTREQVMAELIRVADELNMPDKRGACVIAGMTISQEVGVKDNDPPFERRFWCPANRADPESFNYPHDSESNDGRSVGYFQQQKGPNGELWWGTTASEMNLHSAATQFMTRLKAAGYNASNAQAANDSAQAIQRSGVPQAYKQWWDDINRLYDKVKGSGGGPAPAPKPPQSGPWTGDPVWLADVLRAEGLNVVELPGWLDRGHGDMGRLWGVVCHHTGSDNTPSSEIAFHPSLGLCSQIHLARNGTVTLCGVGIAWHAGVGSYPGLPEDNANAVTIGIEAQNSGTYDGAPHRTNWPDAQYDAYVKCCAAICRRLGVRADHVISHKEWAGRKQGKWDPGAIDMNIFRADVQRRIDAHQPNGEDDFMAALSADEQREVLNLLRVLADRRFVSRSPFRHLGEGPSETVAGFGLNTDGLNHAQYTIELARLGDPTHLALLREVASAEGDSRYPDRQYDAKLAKRVLAEIEGAATAPAKPSTPSAPTEPAPEAPTPPVKAACALSAAGCVVAGSTSGGGCALSTDGTGKCVVTAATDGGAAAGAGAGMPLRVGSNDANTGGLVSRWQKTMLARYAAYAKAYDGGPLRVDGYFGYDDADVQREYERRTHQVVDGEVSDADLRALGLEAAKRWLFTVHGTGQADPLGPGLPADTARAVLDKYTWQPIGNYPARAFPMWSSIMDGARELRSQIASKSGEVNLAGYSQGAVVVGQVLKHDIMDPKGSLHHRLGDVRKVVLWGNPMRQRGIAHFDEWIHPVAGPDSYGILDDRLEGLEKAPFEIRDYAHAGDMYASITDGDKDEYKIAICKIVMTATDFYRGPNSVVSQLIELGQRPLTEGIAMALAIIDTLRFFTNTAHGYNIGPAIDFLRS

SEQ ID NO: 267 - protein, 882 aa, Artificial Sequence
  58+24+104+14
GIGKFLKKAKKFMVAAWTAVMRIRFASYALGVNGLPIKVDGYFGYDEEKVQKEYQRRTGQFPSGQVSREDLHRLGLLPTLISIHGTGQADPFGIGYPADIARRVLDLYWWQPLGNYPAKAVPMNGSVDQGEREGVRLISDPLIVPGPTAFVDYSQGSVIGGRLRNRMRRKELRGELVAAASFGNPMRLRGHYAGNVDPGGEGIDPRQELAAEPFRIELAAKGDLYTTCPGGQSGEMERAIYHAVFSKFIGEDTLIEQVWELAKNPFREVPAAVKAIVRGGMFAIRGTGPHVRYHIDQCPGTGMTYYEYAVKHLRDTADARLRRIVASVTAGAGAGMSFTRFLQDDPLLTREQVMAELIRVADELNMPDKRGACVIAGMTISQEVGVKDNDPPFERRFWCPANRADPESFNYPHDSESNDGRSVGYFQQQKGPNGELWWGTTASEMNLHSAATQFMTRLKAAGYNASNAQAANDSAQAIQRSGVPQAYKQWWDDINRLYDKVKGSGGGPAPAPKPPQSGPWTGDPVWLADVLRAEGLNVVELPGWLDRGHGDMGRLWGVVCHHTGSDNTPSSEIAFHPSLGLCSQIHLARNGTVTLCGVGIAWHAGVGSYPGLPEDNANAVTIGIEAQNSGTYDGAPHRTNWPDAQYDAYVKCCAAICRRLGVRADHVISHKEWAGRKQGKWDPGAIDMNIFRADVQRRIDAHQPNGEDDFMAALSADEQREVLNLLRVLADRRFVSRSPFRHLGEGPSETVAGFGLNTDGLNHAQYTIELARLGDPTHLALLREVASAEGDSRYPDRQYDAKLAKRVLAEIEGAATAPAKPSTPSAPTEPAPEAPTPPVKAACALSAAGCVVAGSTSGGGCALSTDGTGKCVVTAATDGGAA

SEQ ID NO: 268 - protein, 853 aa, Artificial Sequence
  66+20+110+6
GGLKKLGKKLEGAGKRVFNAAEKALPVVAGAKALRKMRRKFASYAGDLADTPLYDEAMTAAVAEMQARYSAAGQLRAGLYIPGIVGAETKYVMGYLPRPVVDTRPVLITVCGTGVPWWIGPDADTARAVEDKYLWQPIGYPAAPFPMGKSIAAAITETHNQANRWRERIETHGAALAGYSQGAVVVSELWMNHIAPEDGSLHWMKPHIEKAVTWGNPNRELGHVWADHGGSPRAPSNTQGVSSNGMRDTPPWWRDYAHQGDLYACTEPGDTQEVRNAIWQIVRDLDLFTGPDSLLAQVVELVQAPLPEAIAITKALLDAGMFFAKRTGPHVDYNVQPAIDYLRTIPQGRSHPVQPYPGAFMTLIVTRDHAQWVHDMCRARAGNRYGYGGAFTLNPRDTTDCSGLVLQTAAWYGGRKDWIGNRYGSTESFRLDHKIVYDLGFRRLPPGGVAALGFTPVMLVGLQHGGGGRYSHTACTLMTMDIPGGPVKVSQRGVDWESRGEVNGVGVFLYDGARAWNDPLFHDFWYLDAKLEDGPTQSVDAAEILARATGLAYNRAVALLPAVRDGLIQADCTNPNRIAMWLAQIGHESDDFKATAEYASGDAYDTRTDLGNTPEVDGDGRLYKGRSWIMITGKDNYRDFSRWAHGRGLVPTPDYFVVHPLELSELRWAGIGAAWYWTVERPDINALSDRRDLETVTRRINGGLTNLDDRRRRYNLALAVGDQLLTLIGDDDELADPTIQRFIREIHGALFNTVVTQSPYGDPQNPDGSEPRSNLWQLHELIKNGDGMGHARYVEESARAGDLRELERVVRAAKGLGRDRSPEFIARARNVLAQIEAANPEYLQAYIARNGAL

SEQ ID NO: 269 - protein, 813 aa, Artificial Sequence
  86+16+110+2
RPWAGNGSVHRYTVLSPRLKTQMSKPWLFTVHGTGQPDPLGPGLPADTARDVLDIYRWQPIGNYPAAAFPMWPSVEKGVAELILQIELKLDADPYADFAMAGYSQGAIVVGQVLKHHILPPTGRLHRFLHRLKKVIFWGNPMRQKGFAHSDEWIHPVAAPDTLGILEDRLENLEQYGFEVRDYAHDGDMYASIKEDDLHEYEVAIGRIVMKASGFIGGRDSVVAQLIELGQRPITEGIALAGAIIDALTFFARSRMGDKWPHLYNRYPAVEFLRQIIPQGRSHPVQPYPGAFMTERVLPYDRNIVPQETGWWCGPAATQVVLNSRGIIVPEATLANEIEQIENPGRGDDRDGTDYVGLIEQVLDRRVPEAKYTSVYMPNDPPTAAQREALWQNIVRSINAGWGVIMNWVAPPSNKPRGVKGSPNPKYSGGTTYHYVACMGYDDTPGARALWIADSGFQPFNYWISFDQAATLIPPKGYAYAATTATAPAPAPAPVDAAPILARAAGISEAKAREILPTFRDGLRLAECNNVPRIAMFIAQTGHESDNFNATQEYDHGRNYGDPNEATDRWKYKGRTWIQITWRGNYERFSRWCFDRKLVPTPTYFVDNPRALADVRWAGIGAAWYWTVERPSINRLCDERNLTEVTRLINGGTSWEAPTWMKHRKERYDRALAVGNDLLKLLDGEEEGFLSALTPKEQRELYDEIMKRGPSRSFLADDGRQIETLLGFIYNIDGNAWNIVNILGCLIGVPECVDDIRDVAENGVRKGSYAESNPWLAQFGQEFCKRLLPLAGKLSELLNAQEFKVTHNRIIEQ

SEQ ID NO: 270 - protein, 655 aa, Artificial Sequence
  86+34+112+10
RPWAGNGSVHRYTVLSPRLKTQMTMAIVISLRKPARLAAFASAVLCAGAALATGPAPVASAEPCSDIEVVFARGTSEPAGIGRVGQALTDAIRNQVGGRTVSTYGVNYPATYDFLAAADGANDATNRIATLAEQCPSTRVVLGGYSQGAAVVDMLLGIPPLGNKVGNFGSAPPLPSNLMNNVAAVAVFGNPSAKFGIPVTSRFGGRAIDACSDGDPICSDGRNPFAHTHYESSPFIPQAAGLIAGLVPAVPPPMPVYAIQSGTVIYAGAASGYGGPDPAGWLVIDSDDAEGGGCLEYGHIVREVNRGDHVTAGQRIGHINPNNRTNGGVAPHLHVTDWPHAYGQGSRQNVMARLSGAREPEAQAAPTPTEQGTVVGDPVWLADVVRPTVAKFAEYPGWRNRGHGDFKDIRGVMVHHTGGPASAASIANGRPDLAGPLAQLHISRDGTVTVVAVGVAWHAGAGSYPWLPTNMGNWHLIGIECEWPYGEPGINERNAYTVRWRDPEIIALRNTCAAILLRLGLGVDRLIGHKDYAGRAQGKWDPGNMSMDWLRGEVRKDMDGFVFPGEDIVNVTPPPVPAPVPAPPATANVLLHRGMSGPNVVKLQTTLRRWYSKLAVDGDFGPHTEACVRDRQRIYGLDVDGIVGPLTAAKIGLVL

SEQ ID NO: 271 - protein, 907 aa, Artificial Sequence
  36+14+106+28
KFFRKLKKSVKKRAKEFFKKPRVIGVSIPFMSFTRFLQDDPLLTREQVMAELIRVADELNMPDKRGACVIAGMTISQEVGVKDNDPPFERRFWCPANRADPESFNYPHDSESNDGRSVGYFQQQKGPNGELWWGTTASEMNLHSAATQFMTRLKAAGYNASNAQAANDSAQAIQRSGVPQAYKQWWDDINRLYDKVKGSGGGPAPAPKPPQSGPWTGDPVWLADVLRAEGLNVVELPGWLDRGHGDMGRLWGVVCHHTGSDNTPSSEIAFHPSLGLCSQIHLARNGTVTLCGVGIAWHAGVGSYPGLPEDNANAVTIGIEAQNSGTYDGAPHRTNWPDAQYDAYVKCCAAICRRLGVRADHVISHKEWAGRKQGKWDPGAIDMNIFRADVQRRIDAHQPNGEDDFMAALSADEQREVLNLLRVLADRRFVSRSPFRHLGEGPSETVAGFGLNTDGLNHAQYTIELARLGDPTHLALLREVASAEGDSRYPDRQYDAKLAKRVLAEIEGAATAPAKPSTPSAPTEPAPEAPTPPVKAACALSAAGCVVAGSTSGGGCALSTDGTGKCVVTAATDGGAALSRFFHAELMPLRVGSNDANTGGLVSRWQKTMLARYAAYAKAYDGGPLRVDGYFGYDDADVQREYERRTHQVVDGEVSDADLRALGLEAAKRWLFTVHGTGQADPLGPGLPADTARAVLDKYTWQPIGNYPARAFPMWSSIMDGARELRSQIASKSGEVNLAGYSQGAVVVGQVLKHDIMDPKGSLHHRLGDVRKVVLWGNPMRQRGIAHFDEWIHPVAGPDSYGILDDRLEGLEKAPFEIRDYAHAGDMYASITDGDKDEYKIAICKIVMTATDFYRGPNSVVSQLIELGQRPLTEGIAMALAIIDTLRFFTNTAHGYNIGPAIDFLRS

SEQ ID NO: 272 - protein, 912 aa, Artificial Sequence
  36+22+110+2
KFFRKLKKSVKKRAKEFFKKPRVIGVSIPFMTWIGWQQGMAGEPVAAAKRELRRKFSYAKHLDDSDVFDLELLAVLIEYQQKKNATGYTPRLREDGVLDWATQVAIGTVQTGPPPKAGTLFTVQGTGVDMWTGPPADTARAVEGDWEWQPIGNYPASPFPMWASIWQGIEELRFQIRRHATEKPGKAIALAGFSQGAVVVSWVYKWDIALPGGMLHDLLPQVAAGVTWGNPMAEKGKFHGNRFAGWPVPAGMGINRDRLENTPALWLDFGHGRNSPWGQDIYCDRPDNLAGQDMELICDLVMAQDLWRFVTDFAVKAGNVMASPETELPAILDAVTQAGMFFIVNRTAPHLTYDVGPAIDYLRQVARDRRLALAAIPQGRSHPVQPYPGAFMTERVLPYDRNIVPQETGWWCGPAATQVVLNSRGIIVPEATLANEIEQIENPGRGDDRDGTDYVGLIEQVLDRRVPEAKYTSVYMPNDPPTAAQREALWQNIVRSINAGWGVIMNWVAPPSNKPRGVKGSPNPKYSGGTTYHYVACMGYDDTPGARALWIADSGFQPFNYWISFDQAATLIPPKGYAYAATTATAPAPAPAPVDAAPILARAAGISEAKAREILPTFRDGLRLAECNNVPRIAMFIAQTGHESDNFNATQEYDHGRNYGDPNEATDRWKYKGRTWIQITWRGNYERFSRWCFDRKLVPTPTYFVDNPRALADVRWAGIGAAWYWTVERPSINRLCDERNLTEVTRLINGGTSWEAPTWMKHRKERYDRALAVGNDLLKLLDGEEEGFLSALTPKEQRELYDEIMKRGPSRSFLADDGRQIETLLGFIYNIDGNAWNIVNILGCLIGVPECVDDIRDVAENGVRKGSYAESNPWLAQFGQEFCKRLLPLAGKLSELLNAQEFKVTHNRIIEQ

SEQ ID NO: 273 - protein, 677 aa, Artificial Sequence; identical to SEQ ID NO: 222
  44+26+110+10

SEQ ID NO: 274 - protein, 727 aa, Artificial Sequence
  98+12+106+28
ILGKIWKGKKSLFMTTKDQVAQITIAEAKARGYTRSECLAIMSTFYQESGWNDTIWDPTHTTYGIAQQDGSYPHRFDGAAAQIKGFFDKLDVWRAKPGASTDIWLNICWMQQAPNWPSADYWYANGRRAYLTEIKSRIATVTPYLDKYWPADGGTAVPDEPRPDFNEFPIWSNNNSARSGKPTMFLIHTQEGGGGDAAAENLAKWFQNGNGVSYHYTISQASDGGVTVVDCVDTDRAAWSVGNANSISINLCFAGSRASWMRDQWMKQSNAIDVAAYLAVQDAKKYGFTPLVVPPPYTNGRPGISDHRWVTDVFKWGTHTDVGDWFPWDYFAERVNHWANGGKTEPEPPKVKRFPDDWSDREILVEILRQLRGYNLTGWPQLGGKTLVDAVAELLGHLSRFFHAELMPLRVGSNDANTGGLVSRWQKTMLARYAAYAKAYDGGPLRVDGYFGYDDADVQREYERRTHQVVDGEVSDADLRALGLEAAKRWLFTVHGTGQADPLGPGLPADTARAVLDKYTWQPIGNYPARAFPMWSSIMDGARELRSQIASKSGEVNLAGYSQGAVVVGQVLKHDIMDPKGSLHHRLGDVRKVVLWGNPMRQRGIAHFDEWIHPVAGPDSYGILDDRLEGLEKAPFEIRDYAHAGDMYASITDGDKDEYKIAICKIVMTATDFYRGPNSVVSQLIELGQRPLTEGIAMALAIIDTLRFFTNTAHGYNIGPAIDFLRS

SEQ ID NO: 275 - protein, 737 aa, Artificial Sequence
  42+20+112+10
GLLSKVLGVGKKVLCGVSGLCMRRKFASYAGDLADTPLYDEAMTAAVAEMQARYSAAGQLRAGLYIPGIVGAETKYVMGYLPRPVVDTRPVLITVCGTGVPWWIGPDADTARAVEDKYLWQPIGYPAAPFPMGKSIAAAITETHNQANRWRERIETHGAALAGYSQGAVVVSELWMNHIAPEDGSLHWMKPHIEKAVTWGNPNRELGHVWADHGGSPRAPSNTQGVSSNGMRDTPPWWRDYAHQGDLYACTEPGDTQEVRNAIWQIVRDLDLFTGPDSLLAQVVELVQAPLPEAIAITKALLDAGMFFAKRTGPHVDYNVQPAIDYLRTPAVPPPMPVYAIQSGTVIYAGAASGYGGPDPAGWLVIDSDDAEGGGCLEYGHIVREVNRGDHVTAGQRIGHINPNNRTNGGVAPHLHVTDWPHAYGQGSRQNVMARLSGAREPEAQAAPTPTEQGTVVGDPVWLADVVRPTVAKFAEYPGWRNRGHGDFKDIRGVMVHHTGGPASAASIANGRPDLAGPLAQLHISRDGTVTVVAVGVAWHAGAGSYPWLPTNMGNWHLIGIECEWPYGEPGINERNAYTVRWRDPEIIALRNTCAAILLRLGLGVDRLIGHKDYAGRAQGKWDPGNMSMDWLRGEVRKDMDGFVFPGEDIVNVTPPPVPAPVPAPPATANVLLHRGMSGPNVVKLQTTLRRWYSKLAVDGDFGPHTEACVRDRQRIYGLDVDGIVGPLTAAKIGLVL

SEQ ID NO: 276 - protein, 915 aa, Artificial Sequence
  56+22+106+14
FRFRCRRRFCRFRFMTWIGWQQGMAGEPVAAAKRELRRKFSYAKHLDDSDVFDLELLAVLIEYQQKKNATGYTPRLREDGVLDWATQVAIGTVQTGPPPKAGTLFTVQGTGVDMWTGPPADTARAVEGDWEWQPIGNYPASPFPMWASIWQGIEELRFQIRRHATEKPGKAIALAGFSQGAVVVSWVYKWDIALPGGMLHDLLPQVAAGVTWGNPMAEKGKFHGNRFAGWPVPAGMGINRDRLENTPALWLDFGHGRNSPWGQDIYCDRPDNLAGQDMELICDLVMAQDLWRFVTDFAVKAGNVMASPETELPAILDAVTQAGMFFIVNRTAPHLTYDVGPAIDYLRQVARDRRLALAALSRFFHAELMSFTRFLQDDPLLTREQVMAELIRVADELNMPDKRGACVIAGMTISQEVGVKDNDPPFERRFWCPANRADPESFNYPHDSESNDGRSVGYFQQQKGPNGELWWGTTASEMNLHSAATQFMTRLKAAGYNASNAQAANDSAQAIQRSGVPQAYKQWWDDINRLYDKVKGSGGGPAPAPKPPQSGPWTGDPVWLADVLRAEGLNVVELPGWLDRGHGDMGRLWGVVCHHTGSDNTPSSEIAFHPSLGLCSQIHLARNGTVTLCGVGIAWHAGVGSYPGLPEDNANAVTIGIEAQNSGTYDGAPHRTNWPDAQYDAYVKCCAAICRRLGVRADHVISHKEWAGRKQGKWDPGAIDMNIFRADVQRRIDAHQPNGEDDFMAALSADEQREVLNLLRVLADRRFVSRSPFRHLGEGPSETVAGFGLNTDGLNHAQYTIELARLGDPTHLALLREVASAEGDSRYPDRQYDAKLAKRVLAEIEGAATAPAKPSTPSAPTEPAPEAPTPPVKAACALSAAGCVVAGSTSGGGCALSTDGTGKCVVTAATDGGAA

SEQ ID NO: 277 - protein, 906 aa, Artificial Sequence
  38+22+110+2
WRSLGRTLLRLSHALKPLARRSGWMTWIGWQQGMAGEPVAAAKRELRRKFSYAKHLDDSDVFDLELLAVLIEYQQKKNATGYTPRLREDGVLDWATQVAIGTVQTGPPPKAGTLFTVQGTGVDMWTGPPADTARAVEGDWEWQPIGNYPASPFPMWASIWQGIEELRFQIRRHATEKPGKAIALAGFSQGAVVVSWVYKWDIALPGGMLHDLLPQVAAGVTWGNPMAEKGKFHGNRFAGWPVPAGMGINRDRLENTPALWLDFGHGRNSPWGQDIYCDRPDNLAGQDMELICDLVMAQDLWRFVTDFAVKAGNVMASPETELPAILDAVTQAGMFFIVNRTAPHLTYDVGPAIDYLRQVARDRRLALAAIPQGRSHPVQPYPGAFMTERVLPYDRNIVPQETGWWCGPAATQVVLNSRGIIVPEATLANEIEQIENPGRGDDRDGTDYVGLIEQVLDRRVPEAKYTSVYMPNDPPTAAQREALWQNIVRSINAGWGVIMNWVAPPSNKPRGVKGSPNPKYSGGTTYHYVACMGYDDTPGARALWIADSGFQPFNYWISFDQAATLIPPKGYAYAATTATAPAPAPAPVDAAPILARAAGISEAKAREILPTFRDGLRLAECNNVPRIAMFIAQTGHESDNFNATQEYDHGRNYGDPNEATDRWKYKGRTWIQITWRGNYERFSRWCFDRKLVPTPTYFVDNPRALADVRWAGIGAAWYWTVERPSINRLCDERNLTEVTRLINGGTSWEAPTWMKHRKERYDRALAVGNDLLKLLDGEEEGFLSALTPKEQRELYDEIMKRGPSRSFLADDGRQIETLLGFIYNIDGNAWNIVNILGCLIGVPECVDDIRDVAENGVRKGSYAESNPWLAQFGQEFCKRLLPLAGKLSELLNAQEFKVTHNRIIEQ

SEQ ID NO: 278 - protein, 741 aa, Artificial Sequence
  98+24+106+10
ILGKIWKGKKSLFMVAAWTAVMRIRFASYALGVNGLPIKVDGYFGYDEEKVQKEYQRRTGQFPSGQVSREDLHRLGLLPTLISIHGTGQADPFGIGYPADIARRVLDLYWWQPLGNYPAKAVPMNGSVDQGEREGVRLISDPLIVPGPTAFVDYSQGSVIGGRLRNRMRRKELRGELVAAASFGNPMRLRGHYAGNVDPGGEGIDPRQELAAEPFRIELAAKGDLYTTCPGGQSGEMERAIYHAVFSKFIGEDTLIEQVWELAKNPFREVPAAVKAIVRGGMFAIRGTGPHVRYHIDQCPGTGMTYYEYAVKHLRDTADARLRRIVASVTLSRFFHAELMPVYAIQSGTVIYAGAASGYGGPDPAGWLVIDSDDAEGGGCLEYGHIVREVNRGDHVTAGQRIGHINPNNRTNGGVAPHLHVTDWPHAYGQGSRQNVMARLSGAREPEAQAAPTPTEQGTVVGDPVWLADVVRPTVAKFAEYPGWRNRGHGDFKDIRGVMVHHTGGPASAASIANGRPDLAGPLAQLHISRDGTVTVVAVGVAWHAGAGSYPWLPTNMGNWHLIGIECEWPYGEPGINERNAYTVRWRDPEIIALRNTCAAILLRLGLGVDRLIGHKDYAGRAQGKWDPGNMSMDWLRGEVRKDMDGFVFPGEDIVNVTPPPVPAPVPAPPATANVLLHRGMSGPNVVKLQTTLRRWYSKLAVDGDFGPHTEACVRDRQRIYGLDVDGIVGPLTAAKIGLVL

SEQ ID NO: 279 - protein, 910 aa, Artificial Sequence
  36+24+110+14
KFFRKLKKSVKKRAKEFFKKPRVIGVSIPFMVAAWTAVMRIRFASYALGVNGLPIKVDGYFGYDEEKVQKEYQRRTGQFPSGQVSREDLHRLGLLPTLISIHGTGQADPFGIGYPADIARRVLDLYWWQPLGNYPAKAVPMNGSVDQGEREGVRLISDPLIVPGPTAFVDYSQGSVIGGRLRNRMRRKELRGELVAAASFGNPMRLRGHYAGNVDPGGEGIDPRQELAAEPFRIELAAKGDLYTTCPGGQSGEMERAIYHAVFSKFIGEDTLIEQVWELAKNPFREVPAAVKAIVRGGMFAIRGTGPHVRYHIDQCPGTGMTYYEYAVKHLRDTADARLRRIVASVTIPQGRSHPVQPYPGAFMSFTRFLQDDPLLTREQVMAELIRVADELNMPDKRGACVIAGMTISQEVGVKDNDPPFERRFWCPANRADPESFNYPHDSESNDGRSVGYFQQQKGPNGELWWGTTASEMNLHSAATQFMTRLKAAGYNASNAQAANDSAQAIQRSGVPQAYKQWWDDINRLYDKVKGSGGGPAPAPKPPQSGPWTGDPVWLADVLRAEGLNVVELPGWLDRGHGDMGRLWGVVCHHTGSDNTPSSEIAFHPSLGLCSQIHLARNGTVTLCGVGIAWHAGVGSYPGLPEDNANAVTIGIEAQNSGTYDGAPHRTNWPDAQYDAYVKCCAAICRRLGVRADHVISHKEWAGRKQGKWDPGAIDMNIFRADVQRRIDAHQPNGEDDFMAALSADEQREVLNLLRVLADRRFVSRSPFRHLGEGPSETVAGFGLNTDGLNHAQYTIELARLGDPTHLALLREVASAEGDSRYPDRQYDAKLAKRVLAEIEGAATAPAKPSTPSAPTEPAPEAPTPPVKAACALSAAGCVVAGSTSGGGCALSTDGTGKCVVTAATDGGAA

SEQ ID NO: 280 - protein, 848 aa, Artificial Sequence
  36+18+110+2
KFFRKLKKSVKKRAKEFFKKPRVIGVSIPFMLNGEFYVPAGTIITANGTGVPDGAGPGFGADLARELERVAEGMWIWKWINYPAAVMPMRPSINTLRLALKEMIRTTPGKIVLSAYSQSAVAFAYVWRDDILNPDGELHDRLDDIVAVILYGNPVRAPGIAYGNELGGQSAPGKLNGHVTGGIAGPDCLRPEECVHPVTGRRIVLDFANAGDLYAAAPVGAEPWVKETEVGHNETLIYEAVMDFNGRDILAFAKEIAQILTMPLSQVVPLVQAIINGLSFLVQGPKAPHWTYTIGPAVDYLVRTGNELRKNIPQGRSHPVQPYPGAFMTERVLPYDRNIVPQETGWWCGPAATQVVLNSRGIIVPEATLANEIEQIENPGRGDDRDGTDYVGLIEQVLDRRVPEAKYTSVYMPNDPPTAAQREALWQNIVRSINAGWGVIMNWVAPPSNKPRGVKGSPNPKYSGGTTYHYVACMGYDDTPGARALWIADSGFQPFNYWISFDQAATLIPPKGYAYAATTATAPAPAPAPVDAAPILARAAGISEAKAREILPTFRDGLRLAECNNVPRIAMFIAQTGHESDNFNATQEYDHGRNYGDPNEATDRWKYKGRTWIQITWRGNYERFSRWCFDRKLVPTPTYFVDNPRALADVRWAGIGAAWYWTVERPSINRLCDERNLTEVTRLINGGTSWEAPTWMKHRKERYDRALAVGNDLLKLLDGEEEGFLSALTPKEQRELYDEIMKRGPSRSFLADDGRQIETLLGFIYNIDGNAWNIVNILGCLIGVPECVDDIRDVAENGVRKGSYAESNPWLAQFGQEFCKRLLPLAGKLSELLNAQEFKVTHNRIIEQ

SEQ ID NO: 281 - protein, 675 aa, Artificial Sequence
  36+26+112+10
KFFRKLKKSVKKRAKEFFKKPRVIGVSIPFMWSGYPADLARRVEDLYYFQPIYYGPGGIPATVPMGASAQSGVDMGVRLVLECEARPSRDVPDGYALCGYSQGGMVVSALLDEFRTGRLRHLNGKLMAGSTFGNPWRELDSNGGRGISDRRIVGTPDFWVDEFDPGDIYANVPNNDVGDDMTAIFKLVQLRSLADLIGIGSIMDRVMDVLRGPLSGMRSVVEAIVRGLLFFGRKPPTAPHTEYHLREVRPGVTYFEHAVAHMRAMAAPAVPPPMPVYAIQSGTVIYAGAASGYGGPDPAGWLVIDSDDAEGGGCLEYGHIVREVNRGDHVTAGQRIGHINPNNRTNGGVAPHLHVTDWPHAYGQGSRQNVMARLSGAREPEAQAAPTPTEQGTVVGDPVWLADVVRPTVAKFAEYPGWRNRGHGDFKDIRGVMVHHTGGPASAASIANGRPDLAGPLAQLHISRDGTVTVVAVGVAWHAGAGSYPWLPTNMGNWHLIGIECEWPYGEPGINERNAYTVRWRDPEIIALRNTCAAILLRLGLGVDRLIGHKDYAGRAQGKWDPGNMSMDWLRGEVRKDMDGFVFPGEDIVNVTPPPVPAPVPAPPATANVLLHRGMSGPNVVKLQTTLRRWYSKLAVDGDFGPHTEACVRDRQRIYGLDVDGIVGPLTAAKIGLVL

SEQ ID NO: 282 - protein, 922 aa, Artificial Sequence
  72+22+106+14
TRSSRAGLQFPVGRVHRLLRKMTWIGWQQGMAGEPVAAAKRELRRKFSYAKHLDDSDVFDLELLAVLIEYQQKKNATGYTPRLREDGVLDWATQVAIGTVQTGPPPKAGTLFTVQGTGVDMWTGPPADTARAVEGDWEWQPIGNYPASPFPMWASIWQGIEELRFQIRRHATEKPGKAIALAGFSQGAVVVSWVYKWDIALPGGMLHDLLPQVAAGVTWGNPMAEKGKFHGNRFAGWPVPAGMGINRDRLENTPALWLDFGHGRNSPWGQDIYCDRPDNLAGQDMELICDLVMAQDLWRFVTDFAVKAGNVMASPETELPAILDAVTQAGMFFIVNRTAPHLTYDVGPAIDYLRQVARDRRLALAALSRFFHAELMSFTRFLQDDPLLTREQVMAELIRVADELNMPDKRGACVIAGMTISQEVGVKDNDPPFERRFWCPANRADPESFNYPHDSESNDGRSVGYFQQQKGPNGELWWGTTASEMNLHSAATQFMTRLKAAGYNASNAQAANDSAQAIQRSGVPQAYKQWWDDINRLYDKVKGSGGGPAPAPKPPQSGPWTGDPVWLADVLRAEGLNVVELPGWLDRGHGDMGRLWGVVCHHTGSDNTPSSEIAFHPSLGLCSQIHLARNGTVTLCGVGIAWHAGVGSYPGLPEDNANAVTIGIEAQNSGTYDGAPHRTNWPDAQYDAYVKCCAAICRRLGVRADHVISHKEWAGRKQGKWDPGAIDMNIFRADVQRRIDAHQPNGEDDFMAALSADEQREVLNLLRVLADRRFVSRSPFRHLGEGPSETVAGFGLNTDGLNHAQYTIELARLGDPTHLALLREVASAEGDSRYPDRQYDAKLAKRVLAEIEGAATAPAKPSTPSAPTEPAPEAPTPPVKAACALSAAGCVVAGSTSGGGCALSTDGTGKCVVTAATDGGAA

SEQ ID NO: 283 - protein, 678 aa, Artificial Sequence
  36+26+106+10
KFFRKLKKSVKKRAKEFFKKPRVIGVSIPFMWSGYPADLARRVEDLYYFQPIYYGPGGIPATVPMGASAQSGVDMGVRLVLECEARPSRDVPDGYALCGYSQGGMVVSALLDEFRTGRLRHLNGKLMAGSTFGNPWRELDSNGGRGISDRRIVGTPDFWVDEFDPGDIYANVPNNDVGDDMTAIFKLVQLRSLADLIGIGSIMDRVMDVLRGPLSGMRSVVEAIVRGLLFFGRKPPTAPHTEYHLREVRPGVTYFEHAVAHMRAMAALSRFFHAELMPVYAIQSGTVIYAGAASGYGGPDPAGWLVIDSDDAEGGGCLEYGHIVREVNRGDHVTAGQRIGHINPNNRTNGGVAPHLHVTDWPHAYGQGSRQNVMARLSGAREPEAQAAPTPTEQGTVVGDPVWLADVVRPTVAKFAEYPGWRNRGHGDFKDIRGVMVHHTGGPASAASIANGRPDLAGPLAQLHISRDGTVTVVAVGVAWHAGAGSYPWLPTNMGNWHLIGIECEWPYGEPGINERNAYTVRWRDPEIIALRNTCAAILLRLGLGVDRLIGHKDYAGRAQGKWDPGNMSMDWLRGEVRKDMDGFVFPGEDIVNVTPPPVPAPVPAPPATANVLLHRGMSGPNVVKLQTTLRRWYSKLAVDGDFGPHTEACVRDRQRIYGLDVDGIVGPLTAAKIGLVL

SEQ ID NO: 284 - protein, 889 aa, Artificial Sequence
  58+28+106+14
GIGKFLKKAKKFMPLRVGSNDANTGGLVSRWQKTMLARYAAYAKAYDGGPLRVDGYFGYDDADVQREYERRTHQVVDGEVSDADLRALGLEAAKRWLFTVHGTGQADPLGPGLPADTARAVLDKYTWQPIGNYPARAFPMWSSIMDGARELRSQIASKSGEVNLAGYSQGAVVVGQVLKHDIMDPKGSLHHRLGDVRKVVLWGNPMRQRGIAHFDEWIHPVAGPDSYGILDDRLEGLEKAPFEIRDYAHAGDMYASITDGDKDEYKIAICKIVMTATDFYRGPNSVVSQLIELGQRPLTEGIAMALAIIDTLRFFTNTAHGYNIGPAIDFLRSLSRFFHAELMSFTRFLQDDPLLTREQVMAELIRVADELNMPDKRGACVIAGMTISQEVGVKDNDPPFERRFWCPANRADPESFNYPHDSESNDGRSVGYFQQQKGPNGELWWGTTASEMNLHSAATQFMTRLKAAGYNASNAQAANDSAQAIQRSGVPQAYKQWWDDINRLYDKVKGSGGGPAPAPKPPQSGPWTGDPVWLADVLRAEGLNVVELPGWLDRGHGDMGRLWGVVCHHTGSDNTPSSEIAFHPSLGLCSQIHLARNGTVTLCGVGIAWHAGVGSYPGLPEDNANAVTIGIEAQNSGTYDGAPHRTNWPDAQYDAYVKCCAAICRRLGVRADHVISHKEWAGRKQGKWDPGAIDMNIFRADVQRRIDAHQPNGEDDFMAALSADEQREVLNLLRVLADRRFVSRSPFRHLGEGPSETVAGFGLNTDGLNHAQYTIELARLGDPTHLALLREVASAEGDSRYPDRQYDAKLAKRVLAEIEGAATAPAKPSTPSAPTEPAPEAPTPPVKAACALSAAGCVVAGSTSGGGCALSTDGTGKCVVTAATDGGAA

SEQ ID NO: 285 - protein, 783 aa, Artificial Sequence
  44+30+108+6
FFHHIFRGKVHVGKTIHRLVTGMSKPWLFTVHGTGQPDPLGPGLPADTARDVLDIYRWQPIGNYPAAAFPMWPSVEKGVAELILQIELKLDADPYADFALAGYSQGAIVVGQVLKHHIINPRGRLHRFLHRLRKVIFWGNPMRQKGFAHTDEWIHQVAASDTMGILEDRLENLEQYGFEVRDYAHDGDMYASIKEDDMHEYEVAIGRIVMSARRFIGGKDSVIAQLIELGQRPIWEGIAMARAIIDALTFFAKSTQGPSWPHLYNRFPAVEFLRRIVFNQRKEHKGYMLAMTLIVTRDHAQWVHDMCRARAGNRYGYGGAFTLNPRDTTDCSGLVLQTAAWYGGRKDWIGNRYGSTESFRLDHKIVYDLGFRRLPPGGVAALGFTPVMLVGLQHGGGGRYSHTACTLMTMDIPGGPVKVSQRGVDWESRGEVNGVGVFLYDGARAWNDPLFHDFWYLDAKLEDGPTQSVDAAEILARATGLAYNRAVALLPAVRDGLIQADCTNPNRIAMWLAQIGHESDDFKATAEYASGDAYDTRTDLGNTPEVDGDGRLYKGRSWIMITGKDNYRDFSRWAHGRGLVPTPDYFVVHPLELSELRWAGIGAAWYWTVERPDINALSDRRDLETVTRRINGGLTNLDDRRRRYNLALAVGDQLLTLIGDDDELADPTIQRFIREIHGALFNTVVTQSPYGDPQNPDGSEPRSNLWQLHELIKNGDGMGHARYVEESARAGDLRELERVVRAAKGLGRDRSPEFIARARNVLAQIEAANPEYLQAYIARNGAL

SEQ ID NO: 286 - protein, 822 aa, Artificial Sequence
  52+16+112+14
FKCRRWQWRMKKLGAMSKPWLFTVHGTGQPDPLGPGLPADTARDVLDIYRWQPIGNYPAAAFPMWPSVEKGVAELILQIELKLDADPYADFAMAGYSQGAIVVGQVLKHHILPPTGRLHRFLHRLKKVIFWGNPMRQKGFAHSDEWIHPVAAPDTLGILEDRLENLEQYGFEVRDYAHDGDMYASIKEDDLHEYEVAIGRIVMKASGFIGGRDSVVAQLIELGQRPITEGIALAGAIIDALTFFARSRMGDKWPHLYNRYPAVEFLRQIPAVPPPMSFTRFLQDDPLLTREQVMAELIRVADELNMPDKRGACVIAGMTISQEVGVKDNDPPFERRFWCPANRADPESFNYPHDSESNDGRSVGYFQQQKGPNGELWWGTTASEMNLHSAATQFMTRLKAAGYNASNAQAANDSAQAIQRSGVPQAYKQWWDDINRLYDKVKGSGGGPAPAPKPPQSGPWTGDPVWLADVLRAEGLNVVELPGWLDRGHGDMGRLWGVVCHHTGSDNTPSSEIAFHPSLGLCSQIHLARNGTVTLCGVGIAWHAGVGSYPGLPEDNANAVTIGIEAQNSGTYDGAPHRTNWPDAQYDAYVKCCAAICRRLGVRADHVISHKEWAGRKQGKWDPGAIDMNIFRADVQRRIDAHQPNGEDDFMAALSADEQREVLNLLRVLADRRFVSRSPFRHLGEGPSETVAGFGLNTDGLNHAQYTIELARLGDPTHLALLREVASAEGDSRYPDRQYDAKLAKRVLAEIEGAATAPAKPSTPSAPTEPAPEAPTPPVKAACALSAAGCVVAGSTSGGGCALSTDGTGKCVVTAATDGGAA

SEQ ID NO: 287 - protein, 702 aa, Artificial Sequence
  44+30+104+10
GWLKKIGKKIERVGQHTRDATIQGLGIPQQAANVAATARGMSKPWLFTVHGTGQPDPLGPGLPADTARDVLDIYRWQPIGNYPAAAFPMWPSVEKGVAELILQIELKLDADPYADFALAGYSQGAIVVGQVLKHHIINPRGRLHRFLHRLRKVIFWGNPMRQKGFAHTDEWIHQVAASDTMGILEDRLENLEQYGFEVRDYAHDGDMYASIKEDDMHEYEVAIGRIVMSARRFIGGKDSVIAQLIELGQRPIWEGIAMARAIIDALTFFAKSTQGPSWPHLYNRFPAVEFLRRIAGAGAGMPVYAIQSGTVIYAGAASGYGGPDPAGWLVIDSDDAEGGGCLEYGHIVREVNRGDHVTAGQRIGHINPNNRTNGGVAPHLHVTDWPHAYGQGSRQNVMARLSGAREPEAQAAPTPTEQGTVVGDPVWLADVVRPTVAKFAEYPGWRNRGHGDFKDIRGVMVHHTGGPASAASIANGRPDLAGPLAQLHISRDGTVTVVAVGVAWHAGAGSYPWLPTNMGNWHLIGIECEWPYGEPGINERNAYTVRWRDPEIIALRNTCAAILLRLGLGVDRLIGHKDYAGRAQGKWDPGNMSMDWLRGEVRKDMDGFVFPGEDIVNVTPPPVPAPVPAPPATANVLLHRGMSGPNVVKLQTTLRRWYSKLAVDGDFGPHTEACVRDRQRIYGLDVDGIVGPLTAAKIGLVL

SEQ ID NO: 288 - protein, 785 aa, Artificial Sequence
  44+22+110+10
FFHHIFRGKVHVGKTIHRLVTGMTWIGWQQGMAGEPVAAAKRELRRKFSYAKHLDDSDVFDLELLAVLIEYQQKKNATGYTPRLREDGVLDWATQVAIGTVQTGPPPKAGTLFTVQGTGVDMWTGPPADTARAVEGDWEWQPIGNYPASPFPMWASIWQGIEELRFQIRRHATEKPGKAIALAGFSQGAVVVSWVYKWDIALPGGMLHDLLPQVAAGVTWGNPMAEKGKFHGNRFAGWPVPAGMGINRDRLENTPALWLDFGHGRNSPWGQDIYCDRPDNLAGQDMELICDLVMAQDLWRFVTDFAVKAGNVMASPETELPAILDAVTQAGMFFIVNRTAPHLTYDVGPAIDYLRQVARDRRLALAAIPQGRSHPVQPYPGAFMPVYAIQSGTVIYAGAASGYGGPDPAGWLVIDSDDAEGGGCLEYGHIVREVNRGDHVTAGQRIGHINPNNRTNGGVAPHLHVTDWPHAYGQGSRQNVMARLSGAREPEAQAAPTPTEQGTVVGDPVWLADVVRPTVAKFAEYPGWRNRGHGDFKDIRGVMVHHTGGPASAASIANGRPDLAGPLAQLHISRDGTVTVVAVGVAWHAGAGSYPWLPTNMGNWHLIGIECEWPYGEPGINERNAYTVRWRDPEIIALRNTCAAILLRLGLGVDRLIGHKDYAGRAQGKWDPGNMSMDWLRGEVRKDMDGFVFPGEDIVNVTPPPVPAPVPAPPATANVLLHRGMSGPNVVKLQTTLRRWYSKLAVDGDFGPHTEACVRDRQRIYGLDVDGIVGPLTAAKIGLVL

SEQ ID NO: 289 - protein, 724 aa, Artificial Sequence
  38+32+106+12
WRSLGRTLLRLSHALKPLARRSGWMRRKFSYAATLADTEFYDEAMTAVVAEMQSRYNTAGQLRDGLYIPGIINAETKYVMGYLSRPVIDTRPVLFTVCGTGVPWWVGPDADTARAVEDQYLWQPIGYPAAPFPMGRSITAGITEAHNQANRWRERIETHGTALAGYSQGAVVLSELWMNHIAPEDGSLRWMKPHVRKAVTWGNPNRELGHVWADHGGSPMAPSNTQGVSSNGMRNTPDWWRDYAHQGDLYACTEPGDTQEVRNAIWQIVRDLDLFTGPDSLLAQVIELAQAPLPETIAITRAILDAGMFFAKRTGPHVDYNPQPAIDYLRTLSRFFHAELMTTKDQVAQITIAEAKARGYTRSECLAIMSTFYQESGWNDTIWDPTHTTYGIAQQDGSYPHRFDGAAAQIKGFFDKLDVWRAKPGASTDIWLNICWMQQAPNWPSADYWYANGRRAYLTEIKSRIATVTPYLDKYWPADGGTAVPDEPRPDFNEFPIWSNNNSARSGKPTMFLIHTQEGGGGDAAAENLAKWFQNGNGVSYHYTISQASDGGVTVVDCVDTDRAAWSVGNANSISINLCFAGSRASWMRDQWMKQSNAIDVAAYLAVQDAKKYGFTPLVVPPPYTNGRPGISDHRWVTDVFKWGTHTDVGDWFPWDYFAERVNHWANGGKTEPEPPKVKRFPDDWSDREILVEILRQLRGYNLTGWPQLGGKTLVDAVAELLGH

SEQ ID NO: 290 - protein, 827 aa, Artificial Sequence
  40+16+112+14
FLGGLIKIVPAMICAVTKKCMSKPWLFTVHGTGQPDPLGPGLPADTARDVLDIYRWQPIGNYPAAAFPMWPSVEKGVAELILQIELKLDADPYADFAMAGYSQGAIVVGQVLKHHILPPTGRLHRFLHRLKKVIFWGNPMRQKGFAHSDEWIHPVAAPDTLGILEDRLENLEQYGFEVRDYAHDGDMYASIKEDDLHEYEVAIGRIVMKASGFIGGRDSVVAQLIELGQRPITEGIALAGAIIDALTFFARSRMGDKWPHLYNRYPAVEFLRQIPAVPPPMSFTRFLQDDPLLTREQVMAELIRVADELNMPDKRGACVIAGMTISQEVGVKDNDPPFERRFWCPANRADPESFNYPHDSESNDGRSVGYFQQQKGPNGELWWGTTASEMNLHSAATQFMTRLKAAGYNASNAQAANDSAQAIQRSGVPQAYKQWWDDINRLYDKVKGSGGGPAPAPKPPQSGPWTGDPVWLADVLRAEGLNVVELPGWLDRGHGDMGRLWGVVCHHTGSDNTPSSEIAFHPSLGLCSQIHLARNGTVTLCGVGIAWHAGVGSYPGLPEDNANAVTIGIEAQNSGTYDGAPHRTNWPDAQYDAYVKCCAAICRRLGVRADHVISHKEWAGRKQGKWDPGAIDMNIFRADVQRRIDAHQPNGEDDFMAALSADEQREVLNLLRVLADRRFVSRSPFRHLGEGPSETVAGFGLNTDGLNHAQYTIELARLGDPTHLALLREVASAEGDSRYPDRQYDAKLAKRVLAEIEGAATAPAKPSTPSAPTEPAPEAPTPPVKAACALSAAGCVVAGSTSGGGCALSTDGTGKCVVTAATDGGAA

SEQ ID NO: 291 - protein, 756 aa, Artificial Sequence
  38+24+114+10
WRSLGRTLLRLSHALKPLARRSGWMVAAWTAVMRIRFASYALGVNGLPIKVDGYFGYDEEKVQKEYQRRTGQFPSGQVSREDLHRLGLLPTLISIHGTGQADPFGIGYPADIARRVLDLYWWQPLGNYPAKAVPMNGSVDQGEREGVRLISDPLIVPGPTAFVDYSQGSVIGGRLRNRMRRKELRGELVAAASFGNPMRLRGHYAGNVDPGGEGIDPRQELAAEPFRIELAAKGDLYTTCPGGQSGEMERAIYHAVFSKFIGEDTLIEQVWELAKNPFREVPAAVKAIVRGGMFAIRGTGPHVRYHIDQCPGTGMTYYEYAVKHLRDTADARLRRIVASVTEAAAKEAAKEAAKMPVYAIQSGTVIYAGAASGYGGPDPAGWLVIDSDDAEGGGCLEYGHIVREVNRGDHVTAGQRIGHINPNNRTNGGVAPHLHVTDWPHAYGQGSRQNVMARLSGAREPEAQAAPTPTEQGTVVGDPVWLADVVRPTVAKFAEYPGWRNRGHGDFKDIRGVMVHHTGGPASAASIANGRPDLAGPLAQLHISRDGTVTVVAVGVAWHAGAGSYPWLPTNMGNWHLIGIECEWPYGEPGINERNAYTVRWRDPEIIALRNTCAAILLRLGLGVDRLIGHKDYAGRAQGKWDPGNMSMDWLRGEVRKDMDGFVFPGEDIVNVTPPPVPAPVPAPPATANVLLHRGMSGPNVVKLQTTLRRWYSKLAVDGDFGPHTEACVRDRQRIYGLDVDGIVGPLTAAKIGLVL

SEQ ID NO: 292 - protein, 831 aa, Artificial Sequence
  38+16+104+14
WRSLGRTLLRLSHALKPLARRSGWMSKPWLFTVHGTGQPDPLGPGLPADTARDVLDIYRWQPIGNYPAAAFPMWPSVEKGVAELILQIELKLDADPYADFAMAGYSQGAIVVGQVLKHHILPPTGRLHRFLHRLKKVIFWGNPMRQKGFAHSDEWIHPVAAPDTLGILEDRLENLEQYGFEVRDYAHDGDMYASIKEDDLHEYEVAIGRIVMKASGFIGGRDSVVAQLIELGQRPITEGIALAGAIIDALTFFARSRMGDKWPHLYNRYPAVEFLRQIAGAGAGMSFTRFLQDDPLLTREQVMAELIRVADELNMPDKRGACVIAGMTISQEVGVKDNDPPFERRFWCPANRADPESFNYPHDSESNDGRSVGYFQQQKGPNGELWWGTTASEMNLHSAATQFMTRLKAAGYNASNAQAANDSAQAIQRSGVPQAYKQWWDDINRLYDKVKGSGGGPAPAPKPPQSGPWTGDPVWLADVLRAEGLNVVELPGWLDRGHGDMGRLWGVVCHHTGSDNTPSSEIAFHPSLGLCSQIHLARNGTVTLCGVGIAWHAGVGSYPGLPEDNANAVTIGIEAQNSGTYDGAPHRTNWPDAQYDAYVKCCAAICRRLGVRADHVISHKEWAGRKQGKWDPGAIDMNIFRADVQRRIDAHQPNGEDDFMAALSADEQREVLNLLRVLADRRFVSRSPFRHLGEGPSETVAGFGLNTDGLNHAQYTIELARLGDPTHLALLREVASAEGDSRYPDRQYDAKLAKRVLAEIEGAATAPAKPSTPSAPTEPAPEAPTPPVKAACALSAAGCVVAGSTSGGGCALSTDGTGKCVVTAATDGGAA

SEQ ID NO: 293 - protein, 646 aa, Artificial Sequence
  98+34+112+10
ILGKIWKGKKSLFMTMAIVISLRKPARLAAFASAVLCAGAALATGPAPVASAEPCSDIEVVFARGTSEPAGIGRVGQALTDAIRNQVGGRTVSTYGVNYPATYDFLAAADGANDATNRIATLAEQCPSTRVVLGGYSQGAAVVDMLLGIPPLGNKVGNFGSAPPLPSNLMNNVAAVAVFGNPSAKFGIPVTSRFGGRAIDACSDGDPICSDGRNPFAHTHYESSPFIPQAAGLIAGLVPAVPPPMPVYAIQSGTVIYAGAASGYGGPDPAGWLVIDSDDAEGGGCLEYGHIVREVNRGDHVTAGQRIGHINPNNRTNGGVAPHLHVTDWPHAYGQGSRQNVMARLSGAREPEAQAAPTPTEQGTVVGDPVWLADVVRPTVAKFAEYPGWRNRGHGDFKDIRGVMVHHTGGPASAASIANGRPDLAGPLAQLHISRDGTVTVVAVGVAWHAGAGSYPWLPTNMGNWHLIGIECEWPYGEPGINERNAYTVRWRDPEIIALRNTCAAILLRLGLGVDRLIGHKDYAGRAQGKWDPGNMSMDWLRGEVRKDMDGFVFPGEDIVNVTPPPVPAPVPAPPATANVLLHRGMSGPNVVKLQTTLRRWYSKLAVDGDFGPHTEACVRDRQRIYGLDVDGIVGPLTAAKIGLVL

SEQ ID NO: 294 - protein, 897 aa, Artificial Sequence
  66+20+112+14
GGLKKLGKKLEGAGKRVFNAAEKALPVVAGAKALRKMRRKFASYAGDLADTPLYDEAMTAAVAEMQARYSAAGQLRAGLYIPGIVGAETKYVMGYLPRPVVDTRPVLITVCGTGVPWWIGPDADTARAVEDKYLWQPIGYPAAPFPMGKSIAAAITETHNQANRWRERIETHGAALAGYSQGAVVVSELWMNHIAPEDGSLHWMKPHIEKAVTWGNPNRELGHVWADHGGSPRAPSNTQGVSSNGMRDTPPWWRDYAHQGDLYACTEPGDTQEVRNAIWQIVRDLDLFTGPDSLLAQVVELVQAPLPEAIAITKALLDAGMFFAKRTGPHVDYNVQPAIDYLRTPAVPPPMSFTRFLQDDPLLTREQVMAELIRVADELNMPDKRGACVIAGMTISQEVGVKDNDPPFERRFWCPANRADPESFNYPHDSESNDGRSVGYFQQQKGPNGELWWGTTASEMNLHSAATQFMTRLKAAGYNASNAQAANDSAQAIQRSGVPQAYKQWWDDINRLYDKVKGSGGGPAPAPKPPQSGPWTGDPVWLADVLRAEGLNVVELPGWLDRGHGDMGRLWGVVCHHTGSDNTPSSEIAFHPSLGLCSQIHLARNGTVTLCGVGIAWHAGVGSYPGLPEDNANAVTIGIEAQNSGTYDGAPHRTNWPDAQYDAYVKCCAAICRRLGVRADHVISHKEWAGRKQGKWDPGAIDMNIFRADVQRRIDAHQPNGEDDFMAALSADEQREVLNLLRVLADRRFVSRSPFRHLGEGPSETVAGFGLNTDGLNHAQYTIELARLGDPTHLALLREVASAEGDSRYPDRQYDAKLAKRVLAEIEGAATAPAKPSTPSAPTEPAPEAPTPPVKAACALSAAGCVVAGSTSGGGCALSTDGTGKCVVTAATDGGAA

SEQ ID NO: 295 - protein, 783 aa, Artificial Sequence
  36+30+112+6
KFFRKLKKSVKKRAKEFFKKPRVIGVSIPFMSKPWLFTVHGTGQPDPLGPGLPADTARDVLDIYRWQPIGNYPAAAFPMWPSVEKGVAELILQIELKLDADPYADFALAGYSQGAIVVGQVLKHHIINPRGRLHRFLHRLRKVIFWGNPMRQKGFAHTDEWIHQVAASDTMGILEDRLENLEQYGFEVRDYAHDGDMYASIKEDDMHEYEVAIGRIVMSARRFIGGKDSVIAQLIELGQRPIWEGIAMARAIIDALTFFAKSTQGPSWPHLYNRFPAVEFLRRIPAVPPPMTLIVTRDHAQWVHDMCRARAGNRYGYGGAFTLNPRDTTDCSGLVLQTAAWYGGRKDWIGNRYGSTESFRLDHKIVYDLGFRRLPPGGVAALGFTPVMLVGLQHGGGGRYSHTACTLMTMDIPGGPVKVSQRGVDWESRGEVNGVGVFLYDGARAWNDPLFHDFWYLDAKLEDGPTQSVDAAEILARATGLAYNRAVALLPAVRDGLIQADCTNPNRIAMWLAQIGHESDDFKATAEYASGDAYDTRTDLGNTPEVDGDGRLYKGRSWIMITGKDNYRDFSRWAHGRGLVPTPDYFVVHPLELSELRWAGIGAAWYWTVERPDINALSDRRDLETVTRRINGGLTNLDDRRRRYNLALAVGDQLLTLIGDDDELADPTIQRFIREIHGALFNTVVTQSPYGDPQNPDGSEPRSNLWQLHELIKNGDGMGHARYVEESARAGDLRELERVVRAAKGLGRDRSPEFIARARNVLAQIEAANPEYLQAYIARNGAL

SEQ ID NO: 296 - protein, 692 aa, Artificial Sequence
  36+16+112+10
KFFRKLKKSVKKRAKEFFKKPRVIGVSIPFMSKPWLFTVHGTGQPDPLGPGLPADTARDVLDIYRWQPIGNYPAAAFPMWPSVEKGVAELILQIELKLDADPYADFAMAGYSQGAIVVGQVLKHHILPPTGRLHRFLHRLKKVIFWGNPMRQKGFAHSDEWIHPVAAPDTLGILEDRLENLEQYGFEVRDYAHDGDMYASIKEDDLHEYEVAIGRIVMKASGFIGGRDSVVAQLIELGQRPITEGIALAGAIIDALTFFARSRMGDKWPHLYNRYPAVEFLRQIPAVPPPMPVYAIQSGTVIYAGAASGYGGPDPAGWLVIDSDDAEGGGCLEYGHIVREVNRGDHVTAGQRIGHINPNNRTNGGVAPHLHVTDWPHAYGQGSRQNVMARLSGAREPEAQAAPTPTEQGTVVGDPVWLADVVRPTVAKFAEYPGWRNRGHGDFKDIRGVMVHHTGGPASAASIANGRPDLAGPLAQLHISRDGTVTVVAVGVAWHAGAGSYPWLPTNMGNWHLIGIECEWPYGEPGINERNAYTVRWRDPEIIALRNTCAAILLRLGLGVDRLIGHKDYAGRAQGKWDPGNMSMDWLRGEVRKDMDGFVFPGEDIVNVTPPPVPAPVPAPPATANVLLHRGMSGPNVVKLQTTLRRWYSKLAVDGDFGPHTEACVRDRQRIYGLDVDGIVGPLTAAKIGLVL

SEQ ID NO: 297 - protein, 755 aa, Artificial Sequence
  94+30+106+4
KKLLPIVANLLKSLLMSKPWLFTVHGTGQPDPLGPGLPADTARDVLDIYRWQPIGNYPAAAFPMWPSVEKGVAELILQIELKLDADPYADFALAGYSQGAIVVGQVLKHHIINPRGRLHRFLHRLRKVIFWGNPMRQKGFAHTDEWIHQVAASDTMGILEDRLENLEQYGFEVRDYAHDGDMYASIKEDDMHEYEVAIGRIVMSARRFIGGKDSVIAQLIELGQRPIWEGIAMARAIIDALTFFAKSTQGPSWPHLYNRFPAVEFLRRILSRFFHAELMPRVVYGLTHSSNGWPMLNSDECEWTKIPGTSVTLQIAKGQPLAILRAFAADFHAYVEPLRDADSACWTPTNSVPSSNHLSGTAMDLNWNTHPFQVPDAGFDAAKKARVKELLDFYEGMVFWGNDWSSPKDAMHFQLASLRNGGTFDTYGNPKTADFIARKIRADGYSTFRRGSAPASAAPILAAATGLSEARAAEILPAVRSGLRESECTNVNRIAMWLAQIGHESGSFQYTEEIAKNGRYAPYIGRTWIQITWDYNYRSFSQWAYAFGMVPTPDYFVVNYRELADLKWAGIGPAWYWTVARPDINELSDRRDLNTVTRRINGGTNGLADRQARYNRALAQGDALLQLLHEEDDFLSALTDAEQRELLDLARQQAKYKRKSRSPLHWPHEGEVDTIAGLSWSTDANVHIQLVEKLAVIYGDPVSIALLYAVSNSDDPTNNPELAKRILKRVKPEDITAAQVQIQKWLAAEQKFHAA

SEQ ID NO: 298 - protein, 685 aa, Artificial Sequence
  90+16+112+10
TWLPAVIKIQAHWRGYRQRKIYLMSKPWLFTVHGTGQPDPLGPGLPADTARDVLDIYRWQPIGNYPAAAFPMWPSVEKGVAELILQIELKLDADPYADFAMAGYSQGAIVVGQVLKHHILPPTGRLHRFLHRLKKVIFWGNPMRQKGFAHSDEWIHPVAAPDTLGILEDRLENLEQYGFEVRDYAHDGDMYASIKEDDLHEYEVAIGRIVMKASGFIGGRDSVVAQLIELGQRPITEGIALAGAIIDALTFFARSRMGDKWPHLYNRYPAVEFLRQIPAVPPPMPVYAIQSGTVIYAGAASGYGGPDPAGWLVIDSDDAEGGGCLEYGHIVREVNRGDHVTAGQRIGHINPNNRTNGGVAPHLHVTDWPHAYGQGSRQNVMARLSGAREPEAQAAPTPTEQGTVVGDPVWLADVVRPTVAKFAEYPGWRNRGHGDFKDIRGVMVHHTGGPASAASIANGRPDLAGPLAQLHISRDGTVTVVAVGVAWHAGAGSYPWLPTNMGNWHLIGIECEWPYGEPGINERNAYTVRWRDPEIIALRNTCAAILLRLGLGVDRLIGHKDYAGRAQGKWDPGNMSMDWLRGEVRKDMDGFVFPGEDIVNVTPPPVPAPVPAPPATANVLLHRGMSGPNVVKLQTTLRRWYSKLAVDGDFGPHTEACVRDRQRIYGLDVDGIVGPLTAAKIGLVL

SEQ ID NO: 299 - protein, 846 aa, Artificial Sequence
  40+24+110+6
FLGGLIKIVPAMICAVTKKCMVAAWTAVMRIRFASYALGVNGLPIKVDGYFGYDEEKVQKEYQRRTGQFPSGQVSREDLHRLGLLPTLISIHGTGQADPFGIGYPADIARRVLDLYWWQPLGNYPAKAVPMNGSVDQGEREGVRLISDPLIVPGPTAFVDYSQGSVIGGRLRNRMRRKELRGELVAAASFGNPMRLRGHYAGNVDPGGEGIDPRQELAAEPFRIELAAKGDLYTTCPGGQSGEMERAIYHAVFSKFIGEDTLIEQVWELAKNPFREVPAAVKAIVRGGMFAIRGTGPHVRYHIDQCPGTGMTYYEYAVKHLRDTADARLRRIVASVTIPQGRSHPVQPYPGAFMTLIVTRDHAQWVHDMCRARAGNRYGYGGAFTLNPRDTTDCSGLVLQTAAWYGGRKDWIGNRYGSTESFRLDHKIVYDLGFRRLPPGGVAALGFTPVMLVGLQHGGGGRYSHTACTLMTMDIPGGPVKVSQRGVDWESRGEVNGVGVFLYDGARAWNDPLFHDFWYLDAKLEDGPTQSVDAAEILARATGLAYNRAVALLPAVRDGLIQADCTNPNRIAMWLAQIGHESDDFKATAEYASGDAYDTRTDLGNTPEVDGDGRLYKGRSWIMITGKDNYRDFSRWAHGRGLVPTPDYFVVHPLELSELRWAGIGAAWYWTVERPDINALSDRRDLETVTRRINGGLTNLDDRRRRYNLALAVGDQLLTLIGDDDELADPTIQRFIREIHGALFNTVVTQSPYGDPQNPDGSEPRSNLWQLHELIKNGDGMGHARYVEESARAGDLRELERVVRAAKGLGRDRSPEFIARARNVLAQIEAANPEYLQAYIARNGAL

SEQ ID NO: 300 - protein, 755 aa, Artificial Sequence
  36+24+104+10
KFFRKLKKSVKKRAKEFFKKPRVIGVSIPFMVAAWTAVMRIRFASYALGVNGLPIKVDGYFGYDEEKVQKEYQRRTGQFPSGQVSREDLHRLGLLPTLISIHGTGQADPFGIGYPADIARRVLDLYWWQPLGNYPAKAVPMNGSVDQGEREGVRLISDPLIVPGPTAFVDYSQGSVIGGRLRNRMRRKELRGELVAAASFGNPMRLRGHYAGNVDPGGEGIDPRQELAAEPFRIELAAKGDLYTTCPGGQSGEMERAIYHAVFSKFIGEDTLIEQVWELAKNPFREVPAAVKAIVRGGMFAIRGTGPHVRYHIDQCPGTGMTYYEYAVKHLRDTADARLRRIVASVTAGAGAGMPVYAIQSGTVIYAGAASGYGGPDPAGWLVIDSDDAEGGGCLEYGHIVREVNRGDHVTAGQRIGHINPNNRTNGGVAPHLHVTDWPHAYGQGSRQNVMARLSGAREPEAQAAPTPTEQGTVVGDPVWLADVVRPTVAKFAEYPGWRNRGHGDFKDIRGVMVHHTGGPASAASIANGRPDLAGPLAQLHISRDGTVTVVAVGVAWHAGAGSYPWLPTNMGNWHLIGIECEWPYGEPGINERNAYTVRWRDPEIIALRNTCAAILLRLGLGVDRLIGHKDYAGRAQGKWDPGNMSMDWLRGEVRKDMDGFVFPGEDIVNVTPPPVPAPVPAPPATANVLLHRGMSGPNVVKLQTTLRRWYSKLAVDGDFGPHTEACVRDRQRIYGLDVDGIVGPLTAAKIGLVL

SEQ ID NO: 301 - protein, 894 aa, Artificial Sequence
  38+24+104+14
WRSLGRTLLRLSHALKPLARRSGWMVAAWTAVMRIRFASYALGVNGLPIKVDGYFGYDEEKVQKEYQRRTGQFPSGQVSREDLHRLGLLPTLISIHGTGQADPFGIGYPADIARRVLDLYWWQPLGNYPAKAVPMNGSVDQGEREGVRLISDPLIVPGPTAFVDYSQGSVIGGRLRNRMRRKELRGELVAAASFGNPMRLRGHYAGNVDPGGEGIDPRQELAAEPFRIELAAKGDLYTTCPGGQSGEMERAIYHAVFSKFIGEDTLIEQVWELAKNPFREVPAAVKAIVRGGMFAIRGTGPHVRYHIDQCPGTGMTYYEYAVKHLRDTADARLRRIVASVTAGAGAGMSFTRFLQDDPLLTREQVMAELIRVADELNMPDKRGACVIAGMTISQEVGVKDNDPPFERRFWCPANRADPESFNYPHDSESNDGRSVGYFQQQKGPNGELWWGTTASEMNLHSAATQFMTRLKAAGYNASNAQAANDSAQAIQRSGVPQAYKQWWDDINRLYDKVKGSGGGPAPAPKPPQSGPWTGDPVWLADVLRAEGLNVVELPGWLDRGHGDMGRLWGVVCHHTGSDNTPSSEIAFHPSLGLCSQIHLARNGTVTLCGVGIAWHAGVGSYPGLPEDNANAVTIGIEAQNSGTYDGAPHRTNWPDAQYDAYVKCCAAICRRLGVRADHVISHKEWAGRKQGKWDPGAIDMNIFRADVQRRIDAHQPNGEDDFMAALSADEQREVLNLLRVLADRRFVSRSPFRHLGEGPSETVAGFGLNTDGLNHAQYTIELARLGDPTHLALLREVASAEGDSRYPDRQYDAKLAKRVLAEIEGAATAPAKPSTPSAPTEPAPEAPTPPVKAACALSAAGCVVAGSTSGGGCALSTDGTGKCVVTAATDGGAA

SEQ ID NO: 302 - protein, 891 aa, Artificial Sequence; identical to SEQ ID NO: 264
  36+20+104+14

SEQ ID NO: 303 - protein, 866 aa, Artificial Sequence
  38+18+108+14
WRSLGRTLLRLSHALKPLARRSGWMLNGEFYVPAGTIITANGTGVPDGAGPGFGADLARELERVAEGMWIWKWINYPAAVMPMRPSINTLRLALKEMIRTTPGKIVLSAYSQSAVAFAYVWRDDILNPDGELHDRLDDIVAVILYGNPVRAPGIAYGNELGGQSAPGKLNGHVTGGIAGPDCLRPEECVHPVTGRRIVLDFANAGDLYAAAPVGAEPWVKETEVGHNETLIYEAVMDFNGRDILAFAKEIAQILTMPLSQVVPLVQAIINGLSFLVQGPKAPHWTYTIGPAVDYLVRTGNELRKNVFNQRKEHKGYMLAMSFTRFLQDDPLLTREQVMAELIRVADELNMPDKRGACVIAGMTISQEVGVKDNDPPFERRFWCPANRADPESFNYPHDSESNDGRSVGYFQQQKGPNGELWWGTTASEMNLHSAATQFMTRLKAAGYNASNAQAANDSAQAIQRSGVPQAYKQWWDDINRLYDKVKGSGGGPAPAPKPPQSGPWTGDPVWLADVLRAEGLNVVELPGWLDRGHGDMGRLWGVVCHHTGSDNTPSSEIAFHPSLGLCSQIHLARNGTVTLCGVGIAWHAGVGSYPGLPEDNANAVTIGIEAQNSGTYDGAPHRTNWPDAQYDAYVKCCAAICRRLGVRADHVISHKEWAGRKQGKWDPGAIDMNIFRADVQRRIDAHQPNGEDDFMAALSADEQREVLNLLRVLADRRFVSRSPFRHLGEGPSETVAGFGLNTDGLNHAQYTIELARLGDPTHLALLREVASAEGDSRYPDRQYDAKLAKRVLAEIEGAATAPAKPSTPSAPTEPAPEAPTPPVKAACALSAAGCVVAGSTSGGGCALSTDGTGKCVVTAATDGGAA

SEQ ID NO: 304 - protein, 746 aa, Artificial Sequence
  96+32+104+10
LVQRGRFGRFLRKIRRFRPKVTITIQGSARFMRRKFSYAATLADTEFYDEAMTAVVAEMQSRYNTAGQLRDGLYIPGIINAETKYVMGYLSRPVIDTRPVLFTVCGTGVPWWVGPDADTARAVEDQYLWQPIGYPAAPFPMGRSITAGITEAHNQANRWRERIETHGTALAGYSQGAVVLSELWMNHIAPEDGSLRWMKPHVRKAVTWGNPNRELGHVWADHGGSPMAPSNTQGVSSNGMRNTPDWWRDYAHQGDLYACTEPGDTQEVRNAIWQIVRDLDLFTGPDSLLAQVIELAQAPLPETIAITRAILDAGMFFAKRTGPHVDYNPQPAIDYLRTAGAGAGMPVYAIQSGTVIYAGAASGYGGPDPAGWLVIDSDDAEGGGCLEYGHIVREVNRGDHVTAGQRIGHINPNNRTNGGVAPHLHVTDWPHAYGQGSRQNVMARLSGAREPEAQAAPTPTEQGTVVGDPVWLADVVRPTVAKFAEYPGWRNRGHGDFKDIRGVMVHHTGGPASAASIANGRPDLAGPLAQLHISRDGTVTVVAVGVAWHAGAGSYPWLPTNMGNWHLIGIECEWPYGEPGINERNAYTVRWRDPEIIALRNTCAAILLRLGLGVDRLIGHKDYAGRAQGKWDPGNMSMDWLRGEVRKDMDGFVFPGEDIVNVTPPPVPAPVPAPPATANVLLHRGMSGPNVVKLQTTLRRWYSKLAVDGDFGPHTEACVRDRQRIYGLDVDGIVGPLTAAKIGLVL

SEQ ID NO: 305 - protein, 742 aa, Artificial Sequence
  66+20+108+12
GGLKKLGKKLEGAGKRVFNAAEKALPVVAGAKALRKMRRKFASYAGDLADTPLYDEAMTAAVAEMQARYSAAGQLRAGLYIPGIVGAETKYVMGYLPRPVVDTRPVLITVCGTGVPWWIGPDADTARAVEDKYLWQPIGYPAAPFPMGKSIAAAITETHNQANRWRERIETHGAALAGYSQGAVVVSELWMNHIAPEDGSLHWMKPHIEKAVTWGNPNRELGHVWADHGGSPRAPSNTQGVSSNGMRDTPPWWRDYAHQGDLYACTEPGDTQEVRNAIWQIVRDLDLFTGPDSLLAQVVELVQAPLPEAIAITKALLDAGMFFAKRTGPHVDYNVQPAIDYLRTVFNQRKEHKGYMLAMTTKDQVAQITIAEAKARGYTRSECLAIMSTFYQESGWNDTIWDPTHTTYGIAQQDGSYPHRFDGAAAQIKGFFDKLDVWRAKPGASTDIWLNICWMQQAPNWPSADYWYANGRRAYLTEIKSRIATVTPYLDKYWPADGGTAVPDEPRPDFNEFPIWSNNNSARSGKPTMFLIHTQEGGGGDAAAENLAKWFQNGNGVSYHYTISQASDGGVTVVDCVDTDRAAWSVGNANSISINLCFAGSRASWMRDQWMKQSNAIDVAAYLAVQDAKKYGFTPLVVPPPYTNGRPGISDHRWVTDVFKWGTHTDVGDWFPWDYFAERVNHWANGGKTEPEPPKVKRFPDDWSDREILVEILRQLRGYNLTGWPQLGGKTLVDAVAELLGH

SEQ ID NO: 306 - protein, 745 aa, Artificial Sequence
  36+32+104+10
KFFRKLKKSVKKRAKEFFKKPRVIGVSIPFMRRKFSYAATLADTEFYDEAMTAVVAEMQSRYNTAGQLRDGLYIPGIINAETKYVMGYLSRPVIDTRPVLFTVCGTGVPWWVGPDADTARAVEDQYLWQPIGYPAAPFPMGRSITAGITEAHNQANRWRERIETHGTALAGYSQGAVVLSELWMNHIAPEDGSLRWMKPHVRKAVTWGNPNRELGHVWADHGGSPMAPSNTQGVSSNGMRNTPDWWRDYAHQGDLYACTEPGDTQEVRNAIWQIVRDLDLFTGPDSLLAQVIELAQAPLPETIAITRAILDAGMFFAKRTGPHVDYNPQPAIDYLRTAGAGAGMPVYAIQSGTVIYAGAASGYGGPDPAGWLVIDSDDAEGGGCLEYGHIVREVNRGDHVTAGQRIGHINPNNRTNGGVAPHLHVTDWPHAYGQGSRQNVMARLSGAREPEAQAAPTPTEQGTVVGDPVWLADVVRPTVAKFAEYPGWRNRGHGDFKDIRGVMVHHTGGPASAASIANGRPDLAGPLAQLHISRDGTVTVVAVGVAWHAGAGSYPWLPTNMGNWHLIGIECEWPYGEPGINERNAYTVRWRDPEIIALRNTCAAILLRLGLGVDRLIGHKDYAGRAQGKWDPGNMSMDWLRGEVRKDMDGFVFPGEDIVNVTPPPVPAPVPAPPATANVLLHRGMSGPNVVKLQTTLRRWYSKLAVDGDFGPHTEACVRDRQRIYGLDVDGIVGPLTAAKIGLVL

SEQ ID NO: 307 - protein, 776 aa, Artificial Sequence
  52+22+108+10
FKCRRWQWRMKKLGAMTWIGWQQGMAGEPVAAAKRELRRKFSYAKHLDDSDVFDLELLAVLIEYQQKKNATGYTPRLREDGVLDWATQVAIGTVQTGPPPKAGTLFTVQGTGVDMWTGPPADTARAVEGDWEWQPIGNYPASPFPMWASIWQGIEELRFQIRRHATEKPGKAIALAGFSQGAVVVSWVYKWDIALPGGMLHDLLPQVAAGVTWGNPMAEKGKFHGNRFAGWPVPAGMGINRDRLENTPALWLDFGHGRNSPWGQDIYCDRPDNLAGQDMELICDLVMAQDLWRFVTDFAVKAGNVMASPETELPAILDAVTQAGMFFIVNRTAPHLTYDVGPAIDYLRQVARDRRLALAAVFNQRKEHKGYMLAMPVYAIQSGTVIYAGAASGYGGPDPAGWLVIDSDDAEGGGCLEYGHIVREVNRGDHVTAGQRIGHINPNNRTNGGVAPHLHVTDWPHAYGQGSRQNVMARLSGAREPEAQAAPTPTEQGTVVGDPVWLADVVRPTVAKFAEYPGWRNRGHGDFKDIRGVMVHHTGGPASAASIANGRPDLAGPLAQLHISRDGTVTVVAVGVAWHAGAGSYPWLPTNMGNWHLIGIECEWPYGEPGINERNAYTVRWRDPEIIALRNTCAAILLRLGLGVDRLIGHKDYAGRAQGKWDPGNMSMDWLRGEVRKDMDGFVFPGEDIVNVTPPPVPAPVPAPPATANVLLHRGMSGPNVVKLQTTLRRWYSKLAVDGDFGPHTEACVRDRQRIYGLDVDGIVGPLTAAKIGLVL

SEQ ID NO: 308 - protein, 793 aa, Artificial Sequence
  36+22+110+10
KFFRKLKKSVKKRAKEFFKKPRVIGVSIPFMTWIGWQQGMAGEPVAAAKRELRRKFSYAKHLDDSDVFDLELLAVLIEYQQKKNATGYTPRLREDGVLDWATQVAIGTVQTGPPPKAGTLFTVQGTGVDMWTGPPADTARAVEGDWEWQPIGNYPASPFPMWASIWQGIEELRFQIRRHATEKPGKAIALAGFSQGAVVVSWVYKWDIALPGGMLHDLLPQVAAGVTWGNPMAEKGKFHGNRFAGWPVPAGMGINRDRLENTPALWLDFGHGRNSPWGQDIYCDRPDNLAGQDMELICDLVMAQDLWRFVTDFAVKAGNVMASPETELPAILDAVTQAGMFFIVNRTAPHLTYDVGPAIDYLRQVARDRRLALAAIPQGRSHPVQPYPGAFMPVYAIQSGTVIYAGAASGYGGPDPAGWLVIDSDDAEGGGCLEYGHIVREVNRGDHVTAGQRIGHINPNNRTNGGVAPHLHVTDWPHAYGQGSRQNVMARLSGAREPEAQAAPTPTEQGTVVGDPVWLADVVRPTVAKFAEYPGWRNRGHGDFKDIRGVMVHHTGGPASAASIANGRPDLAGPLAQLHISRDGTVTVVAVGVAWHAGAGSYPWLPTNMGNWHLIGIECEWPYGEPGINERNAYTVRWRDPEIIALRNTCAAILLRLGLGVDRLIGHKDYAGRAQGKWDPGNMSMDWLRGEVRKDMDGFVFPGEDIVNVTPPPVPAPVPAPPATANVLLHRGMSGPNVVKLQTTLRRWYSKLAVDGDFGPHTEACVRDRQRIYGLDVDGIVGPLTAAKIGLVL

SEQ ID NO: 309 - protein, 784 aa, Artificial Sequence
  68+6+104+16
SWLSKTAKKLENSAKKRISEGIAIAIQGGPRMTLIVTRDHAQWVHDMCRARAGNRYGYGGAFTLNPRDTTDCSGLVLQTAAWYGGRKDWIGNRYGSTESFRLDHKIVYDLGFRRLPPGGVAALGFTPVMLVGLQHGGGGRYSHTACTLMTMDIPGGPVKVSQRGVDWESRGEVNGVGVFLYDGARAWNDPLFHDFWYLDAKLEDGPTQSVDAAEILARATGLAYNRAVALLPAVRDGLIQADCTNPNRIAMWLAQIGHESDDFKATAEYASGDAYDTRTDLGNTPEVDGDGRLYKGRSWIMITGKDNYRDFSRWAHGRGLVPTPDYFVVHPLELSELRWAGIGAAWYWTVERPDINALSDRRDLETVTRRINGGLTNLDDRRRRYNLALAVGDQLLTLIGDDDELADPTIQRFIREIHGALFNTVVTQSPYGDPQNPDGSEPRSNLWQLHELIKNGDGMGHARYVEESARAGDLRELERVVRAAKGLGRDRSPEFIARARNVLAQIEAANPEYLQAYIARNGALAGAGAGMSKPWLFTVHGTGQPDPLGPGLPADTARDVLDIYRWQPIGNYPAAAFPMWPSVEKGVAELILQIELKLDADPYADFAMAGYSQGAIVVGQVLKHHILPPTGRLHRFLHRLKKVIFWGNPMRQKGFAHSDEWIHPVAAPDTLGILEDRLENLEQYGFEVRDYAHDGDMYASIKEDDLHEYEVAIGRIVMKASGFIGGRDSVVAQLIELGQRPITEGIALAGAIIDALTFFARSRMGDKWPHLYNRYPAVEFLRQI

SEQ ID NO: 310 - protein, 836 aa, Artificial Sequence
  92+2+106+18
SSLLEKGLDGAKKAVGGLGKLGKDAMTERVLPYDRNIVPQETGWWCGPAATQVVLNSRGIIVPEATLANEIEQIENPGRGDDRDGTDYVGLIEQVLDRRVPEAKYTSVYMPNDPPTAAQREALWQNIVRSINAGWGVIMNWVAPPSNKPRGVKGSPNPKYSGGTTYHYVACMGYDDTPGARALWIADSGFQPFNYWISFDQAATLIPPKGYAYAATTATAPAPAPAPVDAAPILARAAGISEAKAREILPTFRDGLRLAECNNVPRIAMFIAQTGHESDNFNATQEYDHGRNYGDPNEATDRWKYKGRTWIQITWRGNYERFSRWCFDRKLVPTPTYFVDNPRALADVRWAGIGAAWYWTVERPSINRLCDERNLTEVTRLINGGTSWEAPTWMKHRKERYDRALAVGNDLLKLLDGEEEGFLSALTPKEQRELYDEIMKRGPSRSFLADDGRQIETLLGFIYNIDGNAWNIVNILGCLIGVPECVDDIRDVAENGVRKGSYAESNPWLAQFGQEFCKRLLPLAGKLSELLNAQEFKVTHNRIIEQLSRFFHAELMLNGEFYVPAGTIITANGTGVPDGAGPGFGADLARELERVAEGMWIWKWINYPAAVMPMRPSINTLRLALKEMIRTTPGKIVLSAYSQSAVAFAYVWRDDILNPDGELHDRLDDIVAVILYGNPVRAPGIAYGNELGGQSAPGKLNGHVTGGIAGPDCLRPEECVHPVTGRRIVLDFANAGDLYAAAPVGAEPWVKETEVGHNETLIYEAVMDFNGRDILAFAKEIAQILTMPLSQVVPLVQAIINGLSFLVQGPKAPHWTYTIGPAVDYLVRTGNELRKN

SEQ ID NO: 311 - protein, 914 aa, Artificial Sequence
  36+28+110+14
KFFRKLKKSVKKRAKEFFKKPRVIGVSIPFMPLRVGSNDANTGGLVSRWQKTMLARYAAYAKAYDGGPLRVDGYFGYDDADVQREYERRTHQVVDGEVSDADLRALGLEAAKRWLFTVHGTGQADPLGPGLPADTARAVLDKYTWQPIGNYPARAFPMWSSIMDGARELRSQIASKSGEVNLAGYSQGAVVVGQVLKHDIMDPKGSLHHRLGDVRKVVLWGNPMRQRGIAHFDEWIHPVAGPDSYGILDDRLEGLEKAPFEIRDYAHAGDMYASITDGDKDEYKIAICKIVMTATDFYRGPNSVVSQLIELGQRPLTEGIAMALAIIDTLRFFTNTAHGYNIGPAIDFLRSIPQGRSHPVQPYPGAFMSFTRFLQDDPLLTREQVMAELIRVADELNMPDKRGACVIAGMTISQEVGVKDNDPPFERRFWCPANRADPESFNYPHDSESNDGRSVGYFQQQKGPNGELWWGTTASEMNLHSAATQFMTRLKAAGYNASNAQAANDSAQAIQRSGVPQAYKQWWDDINRLYDKVKGSGGGPAPAPKPPQSGPWTGDPVWLADVLRAEGLNVVELPGWLDRGHGDMGRLWGVVCHHTGSDNTPSSEIAFHPSLGLCSQIHLARNGTVTLCGVGIAWHAGVGSYPGLPEDNANAVTIGIEAQNSGTYDGAPHRTNWPDAQYDAYVKCCAAICRRLGVRADHVISHKEWAGRKQGKWDPGAIDMNIFRADVQRRIDAHQPNGEDDFMAALSADEQREVLNLLRVLADRRFVSRSPFRHLGEGPSETVAGFGLNTDGLNHAQYTIELARLGDPTHLALLREVASAEGDSRYPDRQYDAKLAKRVLAEIEGAATAPAKPSTPSAPTEPAPEAPTPPVKAACALSAAGCVVAGSTSGGGCALSTDGTGKCVVTAATDGGAA

SEQ ID NO: 312 - protein, 831 aa, Artificial Sequence
  14+104+16+38
MSFTRFLQDDPLLTREQVMAELIRVADELNMPDKRGACVIAGMTISQEVGVKDNDPPFERRFWCPANRADPESFNYPHDSESNDGRSVGYFQQQKGPNGELWWGTTASEMNLHSAATQFMTRLKAAGYNASNAQAANDSAQAIQRSGVPQAYKQWWDDINRLYDKVKGSGGGPAPAPKPPQSGPWTGDPVWLADVLRAEGLNVVELPGWLDRGHGDMGRLWGVVCHHTGSDNTPSSEIAFHPSLGLCSQIHLARNGTVTLCGVGIAWHAGVGSYPGLPEDNANAVTIGIEAQNSGTYDGAPHRTNWPDAQYDAYVKCCAAICRRLGVRADHVISHKEWAGRKQGKWDPGAIDMNIFRADVQRRIDAHQPNGEDDFMAALSADEQREVLNLLRVLADRRFVSRSPFRHLGEGPSETVAGFGLNTDGLNHAQYTIELARLGDPTHLALLREVASAEGDSRYPDRQYDAKLAKRVLAEIEGAATAPAKPSTPSAPTEPAPEAPTPPVKAACALSAAGCVVAGSTSGGGCALSTDGTGKCVVTAATDGGAAAGAGAGMSKPWLFTVHGTGQPDPLGPGLPADTARDVLDIYRWQPIGNYPAAAFPMWPSVEKGVAELILQIELKLDADPYADFAMAGYSQGAIVVGQVLKHHILPPTGRLHRFLHRLKKVIFWGNPMRQKGFAHSDEWIHPVAAPDTLGILEDRLENLEQYGFEVRDYAHDGDMYASIKEDDLHEYEVAIGRIVMKASGFIGGRDSVVAQLIELGQRPITEGIALAGAIIDALTFFARSRMGDKWPHLYNRYPAVEFLRQIWRSLGRTLLRLSHALKPLARRSGW

SEQ ID NO: 313 - DNA, 460 bp, Artificial Sequence
  EADA1
tattgtaccacaagaaacgggttggtggtgcggtccggcagcgacgcaagttgttctgaatagtcgtggaattattgtaccggaagcgaccctggcaaatgaaattgaacaaattgaaaatccaggtcgcggtgacgatcgtgatggaacggattatgtggggcttattgaacaagtgcttgatcgccgtgtgcccgaagcgaaatatacgagcgtgtatatgcctaatgatccgcccaccgcagcccaacgcgaagctttatggcaaaatattgtgcgctccattaatgcgggctggggtgtcattatgaattgggtggcgccgccatccaataaaccacgcggagtcaaaggtagccccaatcctaaatattcaggtggtacaacttatcattatgtggcctgtatgggttatgatgatactccgggcgcccgcgccttgtggattgcggattctggg

SEQ ID NO: 314 - DNA, 537 bp, Artificial Sequence
  EADA2
gaaatcttacccacctttcgtgatggtttgcgcttagctgaatgtaataatgttccgcgcattgcaatgtttattgcacaaacaggccacgaaagcgataattttaatgccactcaagaatatgatcatggccgtaattatggcgatccaaatgaagcaaccgatcgttggaaatataaagggcgtacgtggatccaaattacatggcgtggtaattatgagcgtttctcacgttggtgttttgatcgtaaattggtgcctaccccaacatattttgtagataatccacgcgcactcgcggatgttcgttgggcaggaattggcgcggcgtggtattggacggtagaacgtccttccattaatcgcctgtgtgatgagcgtaatttaacggaagttactcgtctgattaatggtggcacatcgtgggaagccccaacctggatgaaacatcgtaaagaacgttatgatcgtgcgttagctgtgggtaatgatcttttaaagctgttagatggcgaagaagaagggtttctgtcggcg

SEQ ID NO: 315 - DNA, 189 bp, Artificial Sequence
  EADA3
agctcgaatcatttgtctggaactgcaatggatcttaattggaatacacatccttttcaagttcccgatgcgggttttgatgctgccaagaaggctcgtgtaaaggaactgttggatttctatgaaggaatggtcttttggggtaatgattggagctcaccgaaagacgcaatgcattttcaactggct

SEQ ID NO: 316 - DNA, 423 bp, Artificial Sequence
  EADA4
agcggtctgcgtgagagtgaatgtactaatgtgaatcgtattgccatgtggttggcgcaaattggccacgagagcggaagttttcaatatacagaagaaattgcgaagaatggtcgctatgcaccatatattggtcgcacctggatccaaattacttgggattataattatcgttcttttagccaatgggcctatgcctttggtatggtccctacaccagattattttgttgtaaattatcgtgaactggcggacttaaaatgggccggaattggtccggcgtggtattggactgttgcgcgtcccgatattaatgaattaagtgatcgtcgtgatttgaataccgtaactcgtcgcattaatggtggtacgaatggtctggctgaccgccaggcgcgttataatcgtgcattggctcaaggt

SEQ ID NO: 317 - DNA, 507 bp, Artificial Sequence
  EADA5
gccgcgccaattttggcagcagcgacgggtctttcggaagcgcgtgccgcagaaattttaccagcagtgcgtagcggtctgcgtgagagtgaatgtactaatgtgaatcgtattgccatgtggttggcgcaaattggccacgagagcggaagttttcaatatacagaagaaattgcgaagaatggtcgctatgcaccatatattggtcgcacctggatccaaattacttgggattataattatcgttcttttagccaatgggcctatgcctttggtatggtccctacaccagattattttgttgtaaattatcgtgaactggcggacttaaaatgggccggaattggtccggcgtggtattggactgttgcgcgtcccgatattaatgaattaagtgatcgtcgtgatttgaataccgtaactcgtcgcattaatggtggtacgaatggtctggctgaccgccaggcgcgttataatcgtgcattggctcaaggtgacgccctcttg

SEQ ID NO: 318 - DNA, 525 bp, Artificial Sequence
  EADA6
accttgattgtaacgcgcgaccatgcgcaatgggtacacgacatgtgtcgtgcccgtgcgggtaatcgttatgggtatggtggtgcctttaccctgaatccgcgtgatacgacggattgttcaggattagtgttacaaaccgccgcgtggtatggtggccgtaaagattggattggcaatcgctatggatcaaccgaatcctttcgcttagatcataaaattgtttatgatttaggatttcgccgtctgccacccggcggtgtcgcagcgctcggctttacgcctgtgatgctggtgggattacaacatggtggtggtggtcgctatagccatactgcgtgtaccctcatgaccatggatattccgggcggtccagtaaaagtatcacagcgtggtgttgattgggaaagccgtggtgaggtgaatggggttggcgtattcttatatgatggtgcccgtgcgtggaatgatcctctgtttcatgatttctggtatttggatgccaaattggaagatggtcctacc

SEQ ID NO: 319 - DNA, 555 bp, Artificial Sequence
  EADA7
caatccgtggatgcagcagagattctggcgcgtgccaccggactggcatataatcgcgctgtcgccttacttcctgcggtccgcgacgggttaattcaagcagattgtacgaatcctaaccgtattgccatgtggctggctcaaattggacacgaatctgatgactttaaagcaacagcagaatatgcgagtggcgacgcatatgatactcgtacagatttggggaatactcccgaagttgatggtgatggacgcctgtataaaggacgcagttggattatgattactgggaaagataattatcgcgattttagtcgctgggcgcatgggcgcgggcttgtaccgacacctgattattttgtcgtgcatcctttggaacttagcgaattacgttgggccggaattggcgcagcttggtattggactgtggaacgtccggatattaatgcgttatcggatcgtcgtgatctggagactgtgactcgtcgtattaatggcggtctgacgaatctggacgatcgtcgccgtcgctataatttagcgctggcagttggg

SEQ ID NO: 320 - DNA, 582 bp, Artificial Sequence
  EADA8
ttaactgtagagagcttcgctgctgctatgggtaacagcttgtcagttgaccgttaccgccaactgtttccagcggcggttgagtcaatggtggcttgtggatgcaccaccgtgaatcgcgcggcgatgtggctggcacaggtcggccatgagtctgggggtttgcgctggatggaggagttagcgtcaggagccgcatatgagtggcgctcggaccttggaaacacgcaggcgggagacggcgtacgctttaaaggccgcggacccatccaaatcacggggcgttataattatcgtaaagtgagtgagtgggctcatgcgcagggcattgtgcctacgccgacatacttcgtggataacccaactcaattggcatcggatcaatacggcttcatcggtgtttcatggtactggcagcacggcgggccacgtccaggccaaattaacggcttcgcagacgcaggggacatcctgtcgggatcgcgctgcgtgaacggatgggtgacaacgccaaacgggatgcccgaccgtactgaacgttggaatcgttgtcgcgctatgggagatcaaatccttccggca

SEQ ID NO: 321 - DNA, 525 bp, Artificial Sequence
  EADA9
gatcgtcttcgtgtgcttccctcctggcagatgtacggtcatggcgattttaaagatatccgcggcgttatggtccaccatactggtaacgctcgcgaaactgccgagtctatccgtaaaggacgccctgatttacgtggtccgctgtccaatattcacatcgcaccggatggcacggtgacattagtcgccgccggagtctgttggcatgcaggagccgggtcgtacccatggttaccaactaataacgccaactggcacatgatcggtattgaatgcgcttggcctacaatccgtccaaacggaacgtatgatgaacgcgagccatggcctgatgctcaaatcatcgctatgcgtgacacctgcgctgcacttaccaaacgtctgggatgggacgcatctcgcgtgatcggtcataaagagtacgctggcgcttcgcaaggtaaatgggaccccggcaacttggatatgggatggtttcgtggagaggtagctaaggcaatgcgtggtgaatttgaccctaaa

SEQ ID NO: 322 - DNA, 279 bp, Artificial Sequence
  EADA10
cctgtctatgcgattcagtctggaactgttatttacgccggtgccgcatcgggatatggtggtcctgaccctgcaggctggcttgttattgattctgatgatgccgagggtggcggctgtttagagtatggtcatattgtccgtgaggtaaatcgtggtgatcatgtgacggcgggtcaacgtattggacatattaatccaaataatcgtacgaatggtggagtggccccgcatcttcatgtaactgactggccacatgcgtatgggcaaggcagccgt

SEQ ID NO: 323 - DNA, 447 bp, Artificial Sequence
  EADA11
tatcctggctggcgtaatcgtggtcacggtgattttaaggatatccgtggagttatggttcatcatacaggtgggcccgcctctgcagcctcaattgcgaatggccgcccagaccttgccggccctcttgcacagctgcatatttcgcgtgatgggacagttactgtcgtagctgtaggagtggcttggcatgcgggtgcaggcagctatccatggttaccgaccaacatgggtaattggcacttgattggtattgaatgtgagtggccatatggtgagccgggaattaatgagcgtaatgcctatacagtacgctggcgtgatccagagattattgcgctgcgtaatacatgtgcggcaattttactgcgccttggcctcggggtagatcgcctgattggccataaggattatgccggccgtgctcaaggcaagtgggacccggga

SEQ ID NO: 324 - DNA, 297 bp, Artificial Sequence
  EADA12
gcaaatcgtgcggatccagagtcttttaattatccacatgatagtgagtccaatgatggacgttcagtggggtattttcaacaacaaaagggcccaaatggtgaactttggtggggcactaccgcgagtgaaatgaatttacatagtgcagccacccaattcatgactcgtttaaaagccgcgggttataatgcctctaatgcgcaagccgcaaatgattctgctcaagctattcaacgttcaggtgttccacaagcctataaacagtggtgggatgatatcaatcgtttatatgat

SEQ ID NO: 325 - DNA, 384 bp, Artificial Sequence
  EADA13
tggggcgtcgtatgtcaccatactggtagtgacaatactccaagctctgaaatcgcattccatcccagcctgggtctttgttcccaaatccatcttgcccgtaatggtacggttacactttgtggcgttggtattgcgtggcacgcaggagtgggatcgtacccggggttgccggaagataatgcaaatgccgtgacaattggtattgaagcacaaaattcgggtacatacgatggtgctcctcatcgcaccaactggccggatgcacagtatgatgcgtacgtcaaatgttgtgcggctatttgtcgtcgtctgggagtccgtgcagaccatgtaatttcgcataaagagtgggcgggccgtaaacagggtaagtgggacccg

SEQ ID NO: 326 - protein, 153 aa, Artificial Sequence
  EADA1 Peptidase_C39_2
IVPQETGWWCGPAATQVVLNSRGIIVPEATLANEIEQIENPGRGDDRDGTDYVGLIEQVLDRRVPEAKYTSVYMPNDPPTAAQREALWQNIVRSINAGWGVIMNWVAPPSNKPRGVKGSPNPKYSGGTTYHYVACMGYDDTPGARALWIADSG

SEQ ID NO: 327 - protein, 179 aa, Artificial Sequence
  EADA2, Lysozyme like domain
EILPTFRDGLRLAECNNVPRIAMFIAQTGHESDNFNATQEYDHGRNYGDPNEATDRWKYKGRTWIQITWRGNYERFSRWCFDRKLVPTPTYFVDNPRALADVRWAGIGAAWYWTVERPSINRLCDERNLTEVTRLINGGTSWEAPTWMKHRKERYDRALAVGNDLLKLLDGEEEGFLSA

SEQ ID NO: 328 - protein, 63 aa, Artificial Sequence
  EADA3 Peptidase_M15_4
SSNHLSGTAMDLNWNTHPFQVPDAGFDAAKKARVKELLDFYEGMVFWGNDWSSPKDAMHFQLA

SEQ ID NO: 329 - protein, 141 aa, Artificial Sequence
  EADA4 Lysozyme like domain
SGLRESECTNVNRIAMWLAQIGHESGSFQYTEEIAKNGRYAPYIGRTWIQITWDYNYRSFSQWAYAFGMVPTPDYFVVNYRELADLKWAGIGPAWYWTVARPDINELSDRRDLNTVTRRINGGTNGLADRQARYNRALAQG

SEQ ID NO: 330 - protein, 168 aa, Artificial Sequence
  EADA5 Chitinase, GH19 family
AAPILAAATGLSEARAAEILPAVRSGLRESECTNVNRIAMWLAQIGHESGSFQYTEEIAKNGRYAPYIGRTWIQITWDYNYRSFSQWAYAFGMVPTPDYFVVNYRELADLKWAGIGPAWYWTVARPDINELSDRRDLNTVTRRINGGTNGLADRQARYNRALAQGDAL

SEQ ID NO: 331 - protein, 175 aa, Artificial Sequence
  EADA6 Cysteine protease
TLIVTRDHAQWVHDMCRARAGNRYGYGGAFTLNPRDTTDCSGLVLQTAAWYGGRKDWIGNRYGSTESFRLDHKIVYDLGFRRLPPGGVAALGFTPVMLVGLQHGGGGRYSHTACTLMTMDIPGGPVKVSQRGVDWESRGEVNGVGVFLYDGARAWNDPLFHDFWYLDAKLEDGPT

SEQ ID NO: 332 - protein, 185 aa, Artificial Sequence
  EADA7 Glyco_hydro_19
QSVDAAEILARATGLAYNRAVALLPAVRDGLIQADCTNPNRIAMWLAQIGHESDDFKATAEYASGDAYDTRTDLGNTPEVDGDGRLYKGRSWIMITGKDNYRDFSRWAHGRGLVPTPDYFVVHPLELSELRWAGIGAAWYWTVERPDINALSDRRDLETVTRRINGGLTNLDDRRRRYNLALAVG

SEQ ID NO: 333 - protein, 194 aa, Artificial Sequence
  EADA8 Glyco_hydro_19
LTVESFAAAMGNSLSVDRYRQLFPAAVESMVACGCTTVNRAAMWLAQVGHESGGLRWMEELASGAAYEWRSDLGNTQAGDGVRFKGRGPIQITGRYNYRKVSEWAHAQGIVPTPTYFVDNPTQLASDQYGFIGVSWYWQHGGPRPGQINGFADAGDILSGSRCVNGWVTTPNGMPDRTERWNRCRAMGDQILPA

SEQ ID NO: 334 - protein, 175 aa, Artificial Sequence
  EADA9 Amid2B
DRLRVLPSWQMYGHGDFKDIRGVMVHHTGNARETAESIRKGRPDLRGPLSNIHIAPDGTVTLVAAGVCWHAGAGSYPWLPTNNANWHMIGIECAWPTIRPNGTYDEREPWPDAQIIAMRDTCAALTKRLGWDASRVIGHKEYAGASQGKWDPGNLDMGWFRGEVAKAMRGEFDPK

SEQ ID NO: 335 - protein, 93 aa, Artificial Sequence
  EADA10 Peptidase_M23
PVYAIQSGTVIYAGAASGYGGPDPAGWLVIDSDDAEGGGCLEYGHIVREVNRGDHVTAGQRIGHINPNNRTNGGVAPHLHVTDWPHAYGQGSR

SEQ ID NO: 336 - protein, 149 aa, Artificial Sequence
  EADA11 Amidase_2
YPGWRNRGHGDFKDIRGVMVHHTGGPASAASIANGRPDLAGPLAQLHISRDGTVTVVAVGVAWHAGAGSYPWLPTNMGNWHLIGIECEWPYGEPGINERNAYTVRWRDPEIIALRNTCAAILLRLGLGVDRLIGHKDYAGRAQGKWDPG

SEQ ID NO: 337 - protein, 99 aa, Artificial Sequence
  EADA12 M23B peptidase
ANRADPESFNYPHDSESNDGRSVGYFQQQKGPNGELWWGTTASEMNLHSAATQFMTRLKAAGYNASNAQAANDSAQAIQRSGVPQAYKQWWDDINRLYD

SEQ ID NO: 338 - protein, 128 aa, Artificial Sequence
  EADA13 M23B peptidase
WGVVCHHTGSDNTPSSEIAFHPSLGLCSQIHLARNGTVTLCGVGIAWHAGVGSYPGLPEDNANAVTIGIEAQNSGTYDGAPHRTNWPDAQYDAYVKCCAAICRRLGVRADHVISHKEWAGRKQGKWDP

SEQ ID NO: 339 - protein, 22 aa, Artificial Sequence
  Purification fusion tag
MHHHHHHSSGVDLGTENLYFQS
